(19) United States
(12) Patent Application Publication
(10) Pub. No.: US 2022/0280655 A1
(43) Pub. Date: Sep. 8, 2022

(54) New Adeno-Associated Virus (AAV) Variants and Uses Thereof for Gene Therapy

(71) Applicants: INSERM (INSTITUT NATIONAL DE LA SANTÉ ET DE LA RECHERCHE MÉDICALE), Paris (FR); Assistance Publique-Hôpitaux de Paris, Paris (FR); Genethon, Evry-Courcouronnes (FR); Sorbonne Université, Paris (FR); Universite de Paris, Paris (FR); Université d'Evry-Val-d'Essonne, Evry (FR); Universite Paris XIII Paris-Nord Villetaneuse, Villetaneuse (FR)

(72) Inventors: Jessica Zucman-Rossi, Paris (FR); Jean-Charles Nault, Paris (FR); Tiziana La Bella, Paris (FR); Giuseppe Ronzitti, Evry (FR); Sandrine Imbeaud, Paris (FR); Patrice Vidal, Evry (FR)

(73) Assignees: Institut National de la Santé et de la Recherche Médicale, Paris (FR); Assistance Publique-Hôpitaux de Paris, Paris (FR); Genethon, Evry-Courcouronnes (FR); Sorbonne Université, Paris (FR); Universite de Paris, Paris (FR); Université d'Evry-Val-d'Essonne, Evry (FR); Universite Paris XIII Paris-Nord Villetaneuse, Villetaneuse (FR)

(21) Appl. No.: 17/605,524

(22) PCT Filed: Apr. 23, 2020
(86) PCT No.: PCT/EP2020/061380

§ 371 Date: Oct. 21, 2021

(30) Foreign Application Priority Data
Apr. 23, 2019 (EP) 19305521.7

(51) Int. Cl. A61K 48/00; C12N 7/00; C12N 15/86

(52) U.S. Cl. CPC A61K 48/005; C12N 7/00; C12N 15/86; C12N 2750/14122; C12N 2750/14123; C12N 2750/14142

(57) ABSTRACT

Adeno-associated virus (AAV) is a defective mono-stranded DNA virus, endemic in human population (35-80%). Recurrent clonal AAV2 insertions are associated with the pathogenesis of rare human hepatocellular carcinoma (HCC) developed on normal liver. The aimed of the inventors was to characterize the natural history of AAV infection in the liver. Viral DNA was thus quantified in tumor and non-tumor liver tissues of 1461 patients. Presence of episomal form and viral mRNA expression were analyzed using a DNAse/TaqMan based assay and quantitative RT-PCR. In silico analyses using viral capture data explored viral variants and new clonal insertions. AAV DNA was detected in 21% of the patients equally distributed in 2 major viral subtypes: one similar to AAV2, the other hybrid between AAV2 and AAV13 sequences. Thus the inventors provided an integrated analysis of the wild type AAV infection in the liver with the identification of viral genotypes, molecular forms, helper virus relationship and viral integrations. These findings are important to understand wild type AAV biology and particularly relevant considering the large usage of AAV vector in liver-targeted gene therapy. Thus, the present invention relates to new adeno-associated virus (AAV) variants and uses thereof for gene therapy.

### FIELD OF THE INVENTION

[0001] The present invention relates to new adeno-associated virus (AAV) variants and uses thereof for gene therapy.

### BACKGROUND OF THE INVENTION

[0002] Adeno-associated virus (AAV) is a small non-enveloped DNA virus composed by an icosahedral capsid that contains a 4.7 kb linear single-stranded genome.^{1, 2} AAV genome codes for non-structural proteins (Rep78, 68, 52 and 40), capsid proteins (VP1, VP2, VP3) and the assembly-activating protein (AAP).^{3, 4} At the extremities, inverse tandem repeats (ITR) are important for the integration in host genomes.^{5, 6} AAV is a defective virus requiring the presence of a helper virus for an active infection, otherwise it establishes a latent infection through integration into host genome or persistence as circular episomal form.⁷⁻⁹ AAV seroprevalence showed that the infection is endemic in human populations (35-80%) starting during childhood.¹⁰⁻¹² Twelve distinct serotypes and more than 100 natural variants have been identified, among which AAV2 is the most frequent type in human.¹³⁻¹⁶

[0003] This small virus has attracted the attention of the gene therapy field because of the lack of identifiable associated disease and the remarkable ability of recombinant AAV (rAAV) vectors to transduce dividing and non-dividing cells with high efficiency, long-term transgene expression, low immunogenicity and specific tissue tropism.¹⁷ Although AAV discovery was performed in 1965, many questions regarding AAV infection remain unanswered.^{2, 18} It is well known that the vector predominantly persist in the nucleus as episomal form with sustained RNA expression raising question about the potential presence of episomal AAV in wild type infection.⁸ Several helper viruses have been identified but their precise association with wild type liver AAV infection remains unclear. Few data on the specific AAV genotypes in the population and on the frequency of AAV persistence after first infection are available.¹⁹

### SUMMARY OF THE INVENTION

[0004] As defined by the claims, the present invention relates to new adeno-associated virus (AAV) variants and uses thereof for gene therapy.

### DETAILED DESCRIPTION OF THE INVENTION

[0005] Adeno-associated virus (AAV) is a defective mono-stranded DNA virus, endemic in human population (35-80%). Recurrent clonal AAV2 insertions are associated with the pathogenesis of rare human hepatocellular carcinoma (HCC) developed in normal liver. The aim of the inventors was to characterize the natural history of AAV infection in the liver. Viral DNA was thus quantified in tumor and non-tumor liver tissues of 1461 patients. Presence of episomal form and viral mRNA expression were analyzed using a DNAse/TaqMan based assay and quantitative RT-PCR. In silico analyses of viral capture data identified viral variants and new clonal insertions. AAV DNA was detected in 21% of the patients equally distributed in 2 major viral subtypes: one similar to AAV2, the other hybrid between AAV2 and AAV13 sequences. Thus, the inventors provided an integrated analysis of the wild type AAV infection in the liver with the identification of viral genotypes, molecular forms, helper virus relationship and viral integrations. These findings are important to understand wild type AAV biology. The data are particularly relevant considering the therapeutic potential of this new AAV variants in liver-targeted gene therapy.

### Main Definitions

[0006] As used herein, the term “polynucleotide” or “nucleic acid” refers to a polymeric form of nucleotides of any length, either ribonucleotides or deoxyribonucleotides. Thus, this term includes, but is not limited to, single-, double- or multi-stranded DNA or RNA, genomic DNA, cDNA, DNA-RNA hybrids, or a polymer comprising purine and pyrimidine bases, or other natural, chemically or biochemically modified, non-natural, or derivatized nucleotide bases. The backbone of the polynucleotide can comprise sugars and phosphate groups (as may typically be found in RNA or DNA), or modified or substituted sugars or phosphate groups. Alternatively, the backbone of the polynucleotide can comprise a polymer of synthetic subunits such as phosphoramidates and thus can be an oligodeoxynucleoside phosphoramidate (P—NH2) or a mixed phosphoramidate-phosphodiester oligomer. In addition, a double-stranded polynucleotide can be obtained from the single stranded polynucleotide product of chemical synthesis either by synthesizing the complementary strand and annealing the strands under appropriate conditions, or by synthesizing the complementary strand de novo using a DNA polymerase with an appropriate primer.

[0007] As used herein, the terms “polypeptide” and “protein” are used interchangeably to refer to a polymer of amino acid residues, and are not limited to a minimum length. Such polymers of amino acid residues may contain natural or non-natural amino acid residues, and include, but are not limited to, peptides, oligopeptides, dimers, trimers, and multimers of amino acid residues. Both full-length proteins and fragments thereof are encompassed by the definition. The terms also include post-expression modifications of the polypeptide, for example, glycosylation, sialylation, acetylation, phosphorylation, and the like. Furthermore, for purposes of the present invention, a “polypeptide” refers to a protein which includes modifications, such as deletions, additions, and substitutions (generally conservative in nature), to the native sequence, as long as the protein maintains the desired activity. These modifications may be deliberate, as through site-directed mutagenesis, or may be accidental, such as through mutations of hosts which produce the proteins or errors due to PCR amplification.

[0008] As used herein, “expression” refers to the process by which a polynucleotide is transcribed from a DNA template (such as into and mRNA or other RNA transcript) and/or the process by which a transcribed mRNA is subsequently translated into peptides, polypeptides, or proteins. Transcripts and encoded polypeptides may be collectively referred to as “gene product.”

[0009] As used herein the term “wild type” or “native” is a term of the art understood by skilled persons and means the typical form of an organism, strain, gene or characteristic as it occurs in nature as distinguished from mutant forms.

[0010] As used herein, the term “mutation” has its general meaning in the art and refers to a substitution, deletion or insertion. In particular, the term “substitution” means that a specific amino acid residue at a specific position is removed and another amino acid residue is inserted into the same position.

[0011] As used herein, the term “variant” refers to a first composition (e.g., a first molecule), that is related to a second composition (e.g., a second molecule, also termed a “parent” molecule). The variant molecule can be derived from, isolated from, based on or homologous to the parent molecule. A variant molecule can have entire sequence identity with the original parent molecule, or alternatively, can have less than 100% sequence identity with the parent molecule. For example, a variant of a sequence can be a second sequence that is at least 50; 51; 52; 53; 54; 55; 56; 57; 58; 59; 60; 61; 62; 63; 64; 65; 66; 67; 68; 69; 70; 71; 72; 73; 74; 75; 76; 77; 78; 79; 80; 81; 82; 83; 84; 85; 86; 87; 88; 89; 90; 91; 92; 93; 94; 95; 96; 97; 98; 99; 100% identical in sequence compared to the original sequence. Sequence identity is frequently measured in terms of percentage identity (or similarity or homology); the higher the percentage, the more similar are the two sequences. Methods of alignment of sequences for comparison are well known in the art. Various programs and alignment algorithms are described in: Smith and Waterman, Adv. Appl. Math., 2:482, 1981; Needleman and Wunsch, J. Mol. Biol., 48:443, 1970; Pearson and Lipman, Proc. Natl. Acad. Sci. U.S.A., 85:2444, 1988; Higgins and Sharp, Gene, 73:237-244, 1988; Higgins and Sharp, CABIOS, 5:151-153, 1989; Corpet et al. Nuc. Acids Res., 16:10881-10890, 1988; Huang et al., Comp. Appls Biosci., 8:155-165, 1992; and Pearson et al., Meth. Mol. Biol., 24:307-31, 1994). Altschul et al., Nat. Genet., 6:119-129, 1994, presents a detailed consideration of sequence alignment methods and homology calculations. By way of example, the alignment tools ALIGN (Myers and Miller, CABIOS 4:11-17, 1989) or LFASTA (Pearson and Lipman, 1988) may be used to perform sequence comparisons (Internet Program® 1996, W. R. Pearson and the University of Virginia, fasta20u63 version 2.0u63, release date December 1996). ALIGN compares entire sequences against one another, while LFASTA compares regions of local similarity. These alignment tools and their respective tutorials are available on the Internet at the NCSA Website, for instance. Alternatively, for comparisons of amino acid sequences of greater than about 30 amino acids, the Blast 2 sequences function can be employed using the default BLOSUM62 matrix set to default parameters, (gap existence cost of 11, and a per residue gap cost of 1). When aligning short peptides (fewer than around 30 amino acids), the alignment should be performed using the Blast 2 sequences function, employing the PAM30 matrix set to default parameters (open gap 9, extension gap 1 penalties). The BLAST sequence comparison system is available, for instance, from the NCBI web site; see also Altschul et al., J. Mol. Biol., 215:403-410, 1990; Gish. & States, Nature Genet., 3:266-272, 1993; Madden et al. Meth. Enzymol., 266:131-141, 1996; Altschul et al., Nucleic Acids Res., 25:3389-3402, 1997; and Zhang & Madden, Genome Res., 7:649-656, 1997.

[0012] As used herein, the term “adeno-associated virus” or “AAV” has its general meaning in the art and refers to a Dependoparvovirus within the Parvoviridae genus of viruses. The term can refer to an AAV derived from a naturally occurring “wild-type” virus, or an AAV derived from a rAAV genome packaged into a capsid derived from capsid proteins encoded by a naturally occurring cap gene. The term “AAV” includes AAV type 1 (AAV-1), AAV type 2 (AAV-2), AAV type 3 (AAV-3), AAV type 4 (AAV-4), AAV type 5 (AAV-5), AAV type 6 (AAV-6), AAV type 7 (AAV-7), AAV type 8 (AAV-8), avian AAV, bovine AAV, canine AAV, porcine AAV, equine AAV, primate AAV, non-primate AAV, and ovine AAV. “Primate AAV” refers to AAV that infect primates, “non-primate AAV” refers to AAV that infect non-primate mammals, “bovine AAV” refers to AAV that infect bovine mammals, etc. The genomic sequences of various serotypes of AAV, as well as the sequences of the native inverted terminal repeats (ITRs), Rep proteins, and capsid subunits are known in the art. Such sequences may be found in the literature or in public databases such as GenBank. See, e.g., GenBank Accession Numbers NC-002077 (AAV-1), AF063497 (AAV-1), NC-001401 (AAV-2), AF043303 (AAV-2), NC-001729 (AAV-3), NC-001829 (AAV-4), U89790 (AAV-4), NC-006152 (AAV-5), AF513851 (AAV-7), AF513852 (AAV-8), and NC-006261 (AAV-8); the disclosures of which are incorporated by reference herein for teaching AAV nucleic acid and amino acid sequences. See also, e.g., Srivistava et al. (1983) J. Virology 45:555; Chiorini et al. (1998) J. Virology 71:6823; Chiorini et al. (1999) J. Virology 73:1309; Bantel-Schaal et al. (1999) J. Virology 73:939; Xiao et al. (1999) J. Virology 73:3994; Muramatsu et al. (1996) Virology 221:208; Shade et al. (1986) J. Virol. 58:921; Gao et al. (2002) Proc. Nat. Acad. Sci. USA 99:11854; Moris et al. (2004) Virology 33:375-383; international patent publications WO 00/28061, WO 99/61601, WO 98/11244; and U.S. Pat. No. 6,156,303. The complete genome of AAV2 is represented by the reference sequence as set forth in SEQ ID NO:1.

| SEQ ID NO: 1 | |
|---|---|
| >NCBI Reference Sequence: NC_001401.2 | |
| 1 | ttggccactc cctctctgcg cgctcgctcg ctcactgagg ccgggcgacc aaaggtcgcc |
| 61 | cgacgcccgg gctttgcccg ggcggcctca gtgagcgagc gagcgcgcag agagggagtg |
| 121 | gccaactcca tcactagggg ttcctggagg ggtggagtcg tgacgtgaat tacgtcatag |
| 181 | ggttagggag gtcctgtatt agaggtcacg tgagtgtttt gcgacatttt gcgacaccat |
| 241 | gtggtcacgc tgggtattta agcccgagtg agcacgcagg gtctccattt tgaagcggga |
| 301 | ggtttgaacg cgcagccgcc atgccggggt tttacgagat tgtgattaag gtccccagcg |
| 361 | accttgacga gcatctgccc ggcatttctg acagctttgt gaactgggtg gccgagaagg |
| 421 | aatgggagtt gccgccagat tctgacatgg atctgaatct gattgagcag gcacccctga |
| 481 | ccgtggccga gaagctgcag cgcgactttc tgacggaatg gcgccgtgtg agtaaggccc |
| 541 | cggaggccct tttctttgtg caatttgaga agggagagag ctacttccac atgcacgtgc |
| 601 | tcgtggaaac caccggggtg aaatccatgg ttttgggacg tttcctgagt cagattcgcg |
| 661 | aaaaactgat tcagagaatt taccgcggga tcgagccgac tttgccaaac tggttcgcgg |
| 721 | tcacaaagac cagaaatggc gccggaggcg ggaacaaggt ggtggatgag tgctacatcc |
| 781 | ccaattactt gctccccaaa acccagcctg agctccagtg ggcgtggact aatatggaac |
| 841 | agtatttaag cgcctgtttg aatctcacgg agcgtaaacg gttggtggcg cagcatctga |
| 901 | cgcacgtgtc gcagacgcag gagcagaaca aagagaatca gaatcccaat tctgatgcgc |
| 961 | cggtgatcag atcaaaaact tcagccaggt acatggagct ggtcgggtgg ctcgtggaca |
| 1021 | aggggattac ctcggagaag cagtggatcc aggaggacca ggcctcatac atctccttca |
| 1081 | atgcggcctc caactcgcgg tcccaaatca aggctgcctt ggacaatgcg ggaaagatta |
| 1141 | tgagcctgac taaaaccgcc cccgactacc tggtgggcca gcagcccgtg gaggacattt |
| 1201 | ccagcaatcg gatttataaa attttggaac taaacgggta cgatccccaa tatgcggctt |
| 1261 | ccgtctttct gggatgggcc acgaaaaagt tcggcaagag gaacaccatc tggctgtttg |
| 1321 | ggcctgcaac taccgggaag accaacatcg cggaggccat agcccacact gtgcccttct |
| 1381 | acgggtgcgt aaactggacc aatgagaact ttcccttcaa cgactgtgtc gacaagatgg |
| 1441 | tgatctggtg ggaggagggg aagatgaccg ccaaggtcgt ggagtcggcc aaagccattc |
| 1501 | tcggaggaag caaggtgcgc gtggaccaga aatgcaagtc ctcggcccag atagacccga |
| 1561 | ctcccgtgat cgtcacctcc aacaccaaca tgtgcgccgt gattgacggg aactcaacga |
| 1621 | ccttcgaaca ccagcagccg ttgcaagacc ggatgttcaa atttgaactc acccgccgtc |
| 1681 | tggatcatga ctttgggaag gtcaccaagc aggaagtcaa agactttttc cggtgggcaa |
| 1741 | aggatcacgt ggttgaggtg gagcatgaat tctacgtcaa aaagggtgga gccaagaaaa |
| 1801 | gacccgcccc cagtgacgca gatataagtg agcccaaacg ggtgcgcgag tcagttgcgc |
| 1861 | agccatcgac gtcagacgcg gaagcttcga tcaactacgc agacaggtac caaaacaaat |
| 1921 | gttctcgtca cgtgggcatg aatctgatgc tgtttccctg cagacaatgc gagagaatga |
| 1981 | atcagaattc aaatatctgc ttcactcacg gacagaaaga ctgtttagag tgctttcccg |
| 2041 | tgtcagaatc tcaacccgtt tctgtcgtca aaaaggcgta tcagaaactg tgctacattc |
| 2101 | atcatatcat gggaaaggtg ccagacgctt gcactgcctg cgatctggtc aatgtggatt |
| 2161 | tggatgactg catctttgaa caataaatga tttaaatcag gtatggctgc cgatggttat |
| 2221 | cttccagatt ggctcgagga cactctctct gaaggaataa gacagtggtg gaagctcaaa |
| 2281 | cctggcccac caccaccaaa gcccgcagag cggcataagg acgacagcag gggtcttgtg |
| 2341 | cttcctgggt acaagtacct cggacccttc aacggactcg acaagggaga gccggtcaac |
| 2401 | gaggcagacg ccgcggccct cgagcacgac aaagcctacg accggcagct cgacagcgga |
| 2461 | gacaacccgt acctcaagta caaccacgcc gacgcggagt ttcaggagcg ccttaaagaa |
| 2521 | gatacgtctt ttgggggcaa cctcggacga gcagtcttcc aggcgaaaaa gagggttctt |
| 2581 | gaacctctgg gcctggttga ggaacctgtt aagacggctc cgggaaaaaa gaggccggta |
| 2641 | gagcactctc ctgtggagcc agactcctcc tcgggaaccg gaaaggcggg ccagcagcct |
| 2701 | gcaagaaaaa gattgaattt tggtcagact ggagacgcag actcagtacc tgacccccag |
| 2761 | cctctcggac agccaccagc agccccctct ggtctgggaa ctaatacgat ggctacaggc |
| 2821 | agtggcgcac caatggcaga caataacgag ggcgccgacg gagtgggtaa ttcctcggga |
| 2881 | aattggcatt gcgattccac atggatgggc gacagagtca tcaccaccag cacccgaacc |
| 2941 | tgggccctgc ccacctacaa caaccacctc tacaaacaaa tttccagcca atcaggagcc |
| 3001 | tcgaacgaca atcactactt tggctacagc accccttggg ggtattttga cttcaacaga |
| 3061 | ttccactgcc acttttcacc acgtgactgg caaagactca tcaacaacaa ctggggattc |
| 3121 | cgacccaaga gactcaactt caagctcttt aacattcaag tcaaagaggt cacgcagaat |
| 3181 | gacggtacga cgacgattgc caataacctt accagcacgg ttcaggtgtt tactgactcg |
| 3241 | gagtaccagc tcccgtacgt cctcggctcg gcgcatcaag gatgcctccc gccgttccca |
| 3301 | gcagacgtct tcatggtgcc acagtatgga tacctcaccc tgaacaacgg gagtcaggca |
| 3361 | gtaggacgct cttcatttta ctgcctggag tactttcctt ctcagatgct gcgtaccgga |
| 3421 | aacaacttta ccttcagcta cacttttgag gacgttcctt tccacagcag ctacgctcac |
| 3481 | agccagagtc tggaccgtct catgaatcct ctcatcgacc agtacctgta ttacttgagc |
| 3541 | agaacaaaca ctccaagtgg aaccaccacg cagtcaaggc ttcagttttc tcaggccgga |
| 3601 | gcgagtgaca ttcgggacca gtctaggaac tggcttcctg gaccctgtta ccgccagcag |
| 3661 | cgagtatcaa agacatctgc ggataacaac aacagtgaat actcgtggac tggagctacc |
| 3721 | aagtaccacc tcaatggcag agactctctg gtgaatccgg gcccggccat ggcaagccac |
| 3781 | aaggacgatg aagaaaagtt ttttcctcag agcggggttc tcatctttgg gaagcaaggc |
| 3841 | tcagagaaaa caaatgtgga cattgaaaag gtcatgatta cagacgaaga ggaaatcagg |
| 3901 | acaaccaatc ccgtggctac ggagcagtat ggttctgtat ctaccaacct ccagagaggc |
| 3961 | aacagacaag cagctaccgc agatgtcaac acacaaggcg ttcttccagg catggtctgg |
| 4021 | caggacagag atgtgtacct tcaggggccc atctgggcaa agattccaca cacggacgga |
| 4081 | cattttcacc cctctcccct catgggtgga ttcggactta aacaccctcc tccacagatt |
| 4141 | ctcatcaaga acaccccggt acctgcgaat ccttcgacca ccttcagtgc ggcaaagttt |
| 4201 | gcttccttca tcacacagta ctccacggga caggtcagcg tggagatcga gtgggagctg |
| 4261 | cagaaggaaa acagcaaacg ctggaatccc gaaattcagt acacttccaa ctacaacaag |
| 4321 | tctgttaatg tggactttac tgtggacact aatggcgtgt attcagagcc tcgccccatt |
| 4381 | ggcaccagat acctgactcg taatctgtaa ttgcttgtta atcaataaac cgtttaattc |
| 4441 | gtttcagttg aactttggtc tctgcgtatt tctttcttat ctagtttcca tggctacgta |
| 4501 | gataagtagc atggcgggtt aatcattaac tacaaggaac ccctagtgat ggagttggcc |
| 4561 | actccctctc tgcgcgctcg ctcgctcact gaggccgggc gaccaaaggt cgcccgacgc |
| 4621 | ccgggctttg cccgggcggc ctcagtgagc gagcgagcgc gcagagaggg agtggccaa |

[0013] As used herein, the term “cap gene” refers to the polynucleotide that encode capsid proteins that form, or contribute to the formation of, the capsid, or protein shell, of the virus. In the case of AAV2, the capsid protein may be VP1, VP2, or VP3. For other parvoviruses, the names and numbers of the capsid proteins can differ. The VP1 capsid protein of AAV2 is represented by the reference amino acid sequence as set forth in SEQ ID NO:2. The VP2 capsid protein of AAV2 is represented by the amino acid sequence that ranges from the amino acid residue at position 138 to the last amino acid residue in SEQ ID NO:2. The VP3 capsid protein of AAV2 is represented by the amino acid sequence that ranges from the amino acid residue at position 203 to the last amino acid residue in SEQ ID NO:2.

SED ID NO: 2
>sp|P03135|CAPSD_AAV2S Capsid protein VP1
OS = Adeno-associated virus 2 (isolate Srivastava/
1982) OX = 648242 GN = VP1 PE = 1 SV = 2
[sequence omitted]

[0014] As used herein, the term “rep gene” refers to the nucleic acid sequences that encode the non-structural proteins (rep78, rep68, rep52 and rep40) required for the replication and production of virus.

[0015] As used herein, the term “packaging” refers to a series of intracellular events that result in the assembly and encapsidation of an AAV virus.

[0016] A “helper virus” for AAV refers to a virus that allows AAV (e.g. wild-type AAV) to be replicated and packaged by a mammalian cell. A variety of such helper viruses for AAV are known in the art, including adenoviruses, herpesviruses and poxviruses such as vaccinia. The adenoviruses encompass a number of different subgroups, although Adenovirus type 5 of subgroup C is most commonly used. Numerous adenoviruses of human, non-human mammalian and avian origin are known and available from depositories such as the ATCC. Viruses of the herpes family include, for example, herpes simplex viruses (HSV) and Epstein-Barr viruses (EBV), as well as cytomegaloviruses (CMV) and pseudorabies viruses (PRV); which are also available from depositories such as ATCC. “Helper virus function(s)” refers to function(s) encoded in a helper virus genome which allow AAV replication and packaging (in conjunction with other requirements for replication and packaging described herein). As described herein, “helper virus function” may be provided in a number of ways, including by providing helper virus or providing, for example, polynucleotide sequences encoding the requisite function(s) to a producer cell in trans. For example, a plasmid or other expression vector comprising nucleotide sequences encoding one or more adenoviral proteins is transfected into a producer cell along with nucleotidic sequences enconding for the AAV rep and cap genes and a transgene expression cassette flanked by two ITRs to produce a rAAV

[0017] As used herein, the term “virus viral particle” is one that comprises a competently assembled viral capsid and is capable of delivering a polynucleotide component into a cell for which the viral species is tropic. The term does not necessarily imply any replication capacity of the virus. Assays for counting infectious viral particles are described elsewhere in this disclosure and in the art. Viral infectivity can be expressed as the ratio of infectious viral particles to total viral particles. Methods of determining the ratio of infectious viral particle to total viral particle are known in the art. See, e.g., Grainger et al. (2005) Mol. Ther. 11:S337 (describing a TCID50 infectious titer assay); and Zolotukhin et al. (1999) Gene Ther. 6:973. See also the Examples.

[0018] As used herein, the term “transgene” refers to a polynucleotide that is introduced into a cell and is capable of being transcribed into RNA and optionally, translated and/or expressed under appropriate conditions. In aspects, it confers a desired property to a cell into which it is introduced, or otherwise leads to a desired therapeutic outcome. In another aspect, it may be transcribed into a molecule that mediates RNA interference, such as miRNA, siRNA, or shRNA.

[0019] As used herein, the term “control element” or “control sequence” is a nucleotide sequence involved in an interaction of molecules that contributes to the functional regulation of a polynucleotide, including replication, duplication, transcription, splicing, translation, or degradation of the polynucleotide. The regulation may affect the frequency, speed, or specificity of the process, and may be enhancing or inhibitory in nature. Control elements known in the art include, for example, transcriptional regulatory sequences such as promoters and enhancers. A promoter is a DNA region capable under certain conditions of binding RNA polymerase and initiating transcription of a coding region usually located downstream (in the 3′ direction) from the promoter.

[0020] As used herein, the term “operatively linked” or “operably linked” refers to a juxtaposition of genetic elements, wherein the elements are in a relationship permitting them to operate in the expected manner. For instance, a promoter is operatively linked to a coding region if the promoter helps initiate transcription of the coding sequence. There may be intervening residues between the promoter and coding region so long as this functional relationship is maintained.

[0021] As used herein, the term “heterologous” means derived from a genotypically distinct entity from that of the rest of the entity to which it is being compared. For example, a polynucleotide introduced by genetic engineering techniques into a plasmid or vector derived from a different species is a heterologous polynucleotide. A promoter removed from its native coding sequence and operatively linked to a coding sequence with which it is not naturally found linked is a heterologous promoter. Thus, for example, an rAAV that includes a heterologous nucleic acid encoding a heterologous gene product is an rAAV that includes a nucleic acid not normally included in a naturally-occurring, wild-type AAV, and the encoded heterologous gene product is a gene product not normally encoded by a naturally-occurring, wild-type AAV.

[0022] As used herein, the term “isolated” when referred to a plasmid, nucleic acid, vector, virus, virion, host cell, or other substance refers to a preparation of the substance devoid of at least some of the other components that may also be present where the substance or a similar substance naturally occurs or is initially prepared from. Thus, for example, an isolated substance may be prepared by using a purification technique to enrich it from a source mixture. Enrichment can be measured on an absolute basis, such as weight per volume of solution, or it can be measured in relation to a second, potentially interfering substance present in the source mixture. Increasing enrichments of the embodiments of this disclosure are increasingly more isolated. An isolated plasmid, nucleic acid, vector, virus, host cell, or other substance is in some embodiments purified, e.g., from about 80% to about 90% pure, at least about 90% pure, at least about 95% pure, at least about 98% pure, or at least about 99%, or more, pure.

[0023] The term “Pharmaceutically” or “pharmaceutically acceptable” refer to molecular entities and compositions that do not produce an adverse, allergic or other untoward reaction when administered to a mammal, especially a human, as appropriate.

[0024] By a “therapeutically effective amount” is meant a sufficient amount of the rAAV of the present invention to treat the disease at a reasonable benefit/risk ratio. It will be understood that the total daily usage of the rAAV of the present invention will be decided by the attending physician within the scope of sound medical judgment. The specific therapeutically effective dose level for any particular patient will depend upon a variety of factors including the age, body weight, general health, sex and diet of the patient; the time of administration, route of administration, and rate of excretion of the specific compound employed; the duration of the treatment; drugs used in combination or coincidental with the specific polypeptide employed; and like factors well known in the medical arts. For example, it is well known within the skill of the art to start doses of the compound at levels lower than those required to achieve the desired therapeutic effect and to gradually increase the dosage until the desired effect is achieved. Thus, the doses of vectors may be adapted depending on the disease condition, the subject (for example, according to his weight, metabolism, etc.), the treatment schedule, etc. A preferred effective dose within the context of this invention is a dose allowing an optimal transduction of the cone photoreceptors. Typically, from 10⁸ to 10¹⁰ viral genomes (vg) are administered per dose in mice. Typically, the doses of AAV to be administered in humans may range from 10⁹ to 10¹² vg.

[0025] Variant AAV2 Capsid Protein:

[0026] An object of the present invention relates to a variant VP1 capsid protein that consists of the amino acid sequence as set forth in SEQ ID NO:2 comprising at least one mutation of the table 1.

[0027] An object of the present invention relates to a variant VP2 capsid protein that consists of the amino acid sequence that ranges from the amino acid at position 138 to the last amino acid in SEQ ID NO:2 comprising at least one mutation of the table 1.

[0028] An object of the present invention relates to a variant VP3 capsid protein that consists of the amino acid sequence that ranges from the amino acid at position 203 to the last amino acid in SEQ ID NO:2 comprising at least one mutation of the table 1.

TABLE 1
List of the mutations present in the capsid sequences

| Nucleotide Change | | |
|---|---|---|
| (coordinates on NC_001401) | Protein Change | Samples with variant |
| 2236G > C | 12E > Q | #2112 |
| 2237A > G | 12E > G | #1010 |
| 2238G > A | | #2112 |
| 2241C > G | 13D > E | #1010 |
| 2241C > A | 13D > E | #2112 |
| 2243_2244delinsAC | 14T > N | #1024 #2112 |
| 2244T > C | | #1010 |
| 2246T > C | 15L > P | #985 |
| 2247C > A | | #2112 |
| 2248_2249delinsAG | | #1024 |
| 2249C > T | 16S > F | #2112 |
| 2251G > C | 17E > Q | #1010 |
| 2251_2253delinsTTC | 17E > F | #2112 |
| 2252A > C | 17E > A | #985 |
| 2255_2256delinsAT | 18G > D | #2112 |
| 2259A > T | | #1024 |
| 2260A > C | | #1024 #2112 |
| 2262A > C | | #1024 |
| 2262A > T | 20R > S | #985 |
| 2263C > G | 21Q > E | #1024 |
| 2272_2275delinsGCTT | 24K > A | #1024 |
| 2277C > G | | #1024 |
| 2277C > T | | #442 |
| 2286_2287delinsAG | 29P > A | #1024 |
| 2289A > C | | #1024 |
| 2292A > T | | #1024 |
| 2292A > G | | #668 |
| 2294C > A | 31P > Q | #1024 |
| 2295A > G | | #M258 |
| 2298A > C | | #1024 |
| 2302C > T | 34P > S | #1602 |
| 2302_2313delinsGCAAATCAACAA | 34_37delinsANQQ | #1024 |
| 2316T > C | | #3013 #3511 #777 |
| 2317A > C | 39K > Q | #1024 #1273 #129 #1534 |
| | | #2102 #2112 |
| 2319G > A | | #1024 #767 |
| 2323G > A | 41D > N | #1024 #2112 #2806 #3086 |
| 2326_2329delinsGCTC | 42S > A | #1024 |
| 2326A > G | 42S > G | #1260 |
| 2327G > A | 42S > N | #1449 #668 |
| 2328C > T | | #3013 |
| 2346T > G | | #1024 |
| 2349G > T | | #1024 |
| 2355G > A | | #1024 |
| 2361C > T | | #1024 #2206 |
| 2367C > T | | #508 |
| 2368_2369delinsGG | 56F > G | #1024 |
| 2385G > A | | #1602 #1704 #2102 #3013 |
| | | #777 |
| 2388A > G | | #1024 #1343 #1449 #2040 |
| | | #3765 #387 #471 #473 |
| 2391G > A | | #1010 |
| 2402AG > CA | 67E > A | #1024 |
| 2412C > G | | #1024 |
| 2419C > A | 73L > I | #508 |
| 2424G > A | | #1010 #2497 #2557 #2806 |
| | | #3013 |
| 2433A > G | | #1010 #1017 #1020 #1024 |
| | | #1158 #1260 #1273 #1286 |
| | | #1343 #1350 #1449 #1534 |
| | | #1570 #1591 #1602 #163 |
| | | #1704 #1919 #2040 #2087 |
| | | #2102 #2107 #2112 #2128 |
| | | #2141 #217 #2206 #2208 |
| | | #2320 #2497 #2557 #2731 |
| | | #2806 #3013 #3086 #3142 |
| | | #3511 #367 #371 #3765 |
| | | #387 #442 #471 #473 #508 |
| | | #668 #685 #704 #714 #767 |
| | | #777 #790 #877 #976 #985 |
| | | #M258 |
| 2436C > A | | #1024 |
| 2443_2444delinsAA | 81R > K | #1024 |
| 2448G > A | | #767 |
| 2452_2456delinsGAGGC | 84DS > KA | #1024 |
| 2454C > A | 84D > E | #2102 |
| 2461G > C | 87D > H | #1010 |
| 2465A > T | 88N > I | #1010 |
| 2466C > T | | #1449 |
| 2478G > A | | #471 |
| 2499G > A | | #767 |
| 2502T > C | | #1704 |
| 2508G > T | 102E > D | #1273 |
| 2511C > T | | #1020 #1024 #129 #1350 |
| | | #1449 #1591 #2040 #2112 |
| | | #217 #2208 #2320 #2806 |
| | | #3013 #3086 #3142 #3511 |
| | | #3765 #387 #471 #508 #685 |
| | | #777 |
| 2538C > A | | #1343 |
| 2546G > C | 115G > A | #1704 |
| 2548C > A | | #1704 |
| 2556C > T | | #1704 |
| 2565G > A | | #1704 #714 #767 #877 |
| | | #M258 |
| 2565G > C | | #2557 |
| 2580T > C | | #1024 |
| 2584C > A | 128P > T | #2320 |
| 2604A > G | | #1343 #2112 #2141 #2557 |
| | | #2806 #3086 #3765 #471 |
| | | #714 #777 #M258 |
| 2606C > A | 135P > H | #2320 |
| 2606C > G | 135P > R | #2731 |
| 2613G > A | | #1273 #1343 #1350 #1449 |
| | | #2112 #2141 #387 #685 |
| | | #714 #777 |
| 2622G > T | | #667 #767 |
| 2625A > T | | #2320 |
| 2635C > G | 145P > A | #2320 |
| 2637G > A | | #2731 #508 |
| 2643G > A | | #471 |
| 2642_2705delins_56nt | 147_168delins_22aa | #2731 |
| 2646_2647delinsTG | 149S > A | #2320 |
| 2646C > T | | #2497 #3013 |
| 2651C > A | 150P > H | #2320 |
| 2654T > C | 151V > A | #1024 #1260 #129 #1534 |
| | | #1591 #1704 #2112 #2128 |
| | | #2206 #2208 #2557 #3013 |
| | | #3142 #3511 #3765 #387 |
| | | #471 #473 #508 #685 #714 |
| | | #767 #877 #M258 |
| 2655G > T | | #2208 |
| 2658G > A | | #2040 #508 |
| 2664C > T | | #1024 #1704 #2208 #3511 |
| | | #387 |
| 2670C > T | | #1017 |
| 2673G > C | | #1024 #1449 #1704 #2208 |
| | | #3511 #387 |
| 2678C > T | 159T > I | #714 |
| 2679C > T | | #1024 #1449 #1704 #2208 |
| | | #3511 #387 |
| 2679C > A | | #2087 |
| 2685G > A | | #1010 #1017 #1020 #1158 |
| | | #1260 #1273 #1286 #129 |
| | | #1343 #1350 #1534 #1570 |
| | | #1591 #1602 #163 #2040 |
| | | #2087 #2107 #2112 #217 |
| | | #2206 #2557 #2731 #2806 |
| | | #3086 #367 #371 #3765 |
| | | #442 #471 #473 #667 #668 |
| | | #685 #704 #714 #767 #777 |
| | | #790 #M258 |
| 2686G > T | 162A > S | #1024 #1449 #1704 #2208 |
| | | #3511 #387 |
| 2692C > A | 164Q > K | #2112 |
| 2692_2694delinsAAC | 164Q > N | #1534 #1704 #1919 #2087 |
| | | #2102 #2128 #2141 #2206 |
| | | #2557 #3142 #3765 #387 |
| | | #471 #508 #790 #877 |
| | | #M258 |
| 2694G > A | | #1024 #1449 #2208 #2806 |
| | | #3086 #3511 |
| 2703A > G | | #1343 #2112 #2806 #3013 |
| | | #3086 #777 |
| 2705G > A | 168R > K | #2806 #3086 |
| 2709A > G | | #1273 #1343 #1704 #1919 |
| | | #2102 #2557 #3013 #3511 |
| | | #387 #442 #508 #777 |
| 2713T > C | | #1017 #1158 #1260 #129 |
| | | #1350 #1602 #2040 #2206 |
| | | #2806 #3086 #3142 #3765 |
| 2716_2724delAATTTTGGT | 172_175delNFG | #1273 |
| 2718T > G | 172N > K | #2806 |
| 2721T > C | | #1010 #1017 #1158 #1260 |
| | | #129 #1343 #1350 #1449 |
| | | #1534 #1602 #1919 #2040 |
| | | #2087 #2102 #2128 #2141 |
| | | #2206 #2557 #3013 #3142 |
| | | #387 #442 #471 #473 #508 |
| | | #667 #668 #685 #714 #767 |
| | | #777 #877 #985 #M258 |
| 2724T > C | | #1010 |
| 2734_2742delinsCCTTATGCT | 178DA > PY | #1055 |
| 2737G > T | 179A > S | #1602 |
| 2742C > T | | #2731 |
| 2744_2751delinsGGCATTGC | 181_183delinsWHC | #2731 |
| 2745A > C | | #1010 #1017 #1020 #1024 |
| | | #1055 #1158 #1260 #1273 |
| | | #1286 #129 #1343 #1350 |
| | | #1449 #1534 #1570 #1591 |
| | | #163 #1704 #1919 #2040 |
| | | #2087 #2102 #2107 #2112 |
| | | #2128 #2141 #217 #2206 |
| | | #2208 #2320 #2557 #2806 |
| | | #3013 #3086 #3142 #3511 |
| | | #367 #371 #3765 #387 #442 |
| | | #471 #473 #508 #667 #668 |
| | | #685 #704 #714 #767 #777 |
| | | #790 #877 #976 #985 |
| | | #M258 |
| 2746_2776delins_31nt | 182_192delins_SSRDMRKVFSA | #1602 |
| 2751T > A | | #2208 |
| 2757C > T | | #2208 |
| 2760G > A | | #2102 #2128 #2208 |
| 2764C > A | 188L > I | #3142 |
| 2770C > A | 190Q > K | #1158 |
| 2770C > G | 190Q > E | #2208 #M258 |
| 2772G > A | | #2208 #442 #790 #M258 |
| 2788T > A | 196S > T | #129 #1602 #2208 #3142 |
| | | #508 #M258 |
| 2790T > A | | #129 #1602 #2208 #3142 |
| | | #508 #M258 |
| 2791G > A | 197G > S | #129 #1602 #2208 #3142 |
| | | #508 #M258 |
| 2794C > T | | #1286 #129 #1570 #1591 |
| | | #1602 #163 #1704 #2107 |
| | | #217 #2208 #2731 #3142 |
| | | #367 #508 #685 #767 |
| | | #M258 |
| 2800A > T | 200T > S | #1020 #1024 #1158 #1286 |
| | | #129 #1350 #1570 #1591 |
| | | #1602 #163 #1704 #2107 |
| | | #217 #2208 #2320 #2731 |
| | | #2806 #3086 #3142 #367 |
| | | #442 #508 #668 #685 #704 |
| | | #714 #767 #790 #976 |
| | | #M258 |
| 2804A > C | 201N > T | #1010 #1020 #1024 #1158 |
| | | #1286 #129 #1350 #1570 |
| | | #1591 #1602 #163 #1704 |
| | | #2040 #2107 #217 #2208 |
| | | #2320 #2731 #2806 #3086 |
| | | #3142 #367 #442 #508 #668 |
| | | #685 #704 #714 #767 #790 |
| | | #976 #M258 |
| 2808G > A | | #1020 #1024 #1158 #1286 |
| | | #129 #1350 #1570 #1591 |
| | | #1602 #163 #1704 #2107 |
| | | #217 #2208 #2320 #2731 |
| | | #2806 #3086 #3142 #367 |
| | | #442 #508 #668 #685 #704 |
| | | #714 #767 #790 #976 |
| | | #M258 |
| 2815A > T | 205T > S | #1017 #1602 #2087 #2206 |
| | | #2208 #2320 #M258 |
| 2821A > G | 207S > G | #1602 #2208 #M258 |
| 2831_2851delins_21nt | 210_217delinsLLLLESLS | #2731 |
| 2833A > G | 211M > V | #1010 #1286 #1570 #1591 |
| | | #1602 #163 #1704 #2107 |
| | | #2112 #217 #2208 #367 |
| | | #714 #767 #790 #976 |
| | | #M258 |
| 2837C > A | 212A > E | #667 |
| 2853C > T | | #1010 #1020 #1024 #1286 |
| | | #129 #1350 #1570 #1591 |
| | | #1602 #163 #1704 #2107 |
| | | #2112 #217 #2208 #2320 |
| | | #2731 #2806 #3086 #3142 |
| | | #367 #442 #508 #667 #668 |
| | | #685 #704 #714 #767 #790 |
| | | #976 #M258 |
| 2859C > T | | #1010 #1020 #1024 #1158 |
| | | #1286 #129 #1350 #1570 |
| | | #1591 #1602 #163 #1704 |
| | | #2107 #2112 #217 #2208 |
| | | #2320 #2731 #2806 #3086 |
| | | #3142 #367 #442 #508 #667 |
| | | #668 #685 #704 #714 #767 |
| | | #790 #976 #M258 |
| 2877G > A | | #1010 #1020 #1024 #1158 |
| | | #1286 #129 #1350 #1570 |
| | | #1591 #1602 #163 #2107 |
| | | #2112 #217 #2208 #2320 |
| | | #2731 #3086 #3142 #367 |
| | | #442 #667 #668 #685 #704 |
| | | #714 #767 #790 #976 |
| 2879_2880insG | N227Kfs277 | #M258 |
| 2899_2900delinsCA | 233T > Q | #1010 #1020 #1024 #1158 |
| | | #1286 #129 #1350 #1570 |
| | | #1591 #1602 #163 #1704 |
| | | #2107 #2112 #217 #2208 |
| | | #2320 #2731 #3086 #3142 |
| | | #367 #442 #667 #668 #685 |
| | | #704 #714 #767 #790 #976 |
| | | #985 |
| 2905A > C | 235M > L | #1010 #1020 #1024 #1158 |
| | | #1286 #129 #1350 #1570 |
| | | #1602 #163 #1704 #2102 |
| | | #2107 #2112 #217 #2208 |
| | | #2320 #2731 #3086 #3142 |
| | | #367 #442 #667 #668 #685 |
| | | #704 #714 #767 #790 #976 |
| | | #985 |
| 2905A > T | 235M > L | #1591 |
| 2911G > A | 237D > N | #685 |
| 2922C > T | | #3142 |
| 2937A > C | | #1055 #1260 #1273 #1343 |
| | | #1534 #1919 #2102 #3511 |
| | | #371 #473 #777 #877 |
| 2946C > T | | #1055 #1260 #1273 #1286 |
| | | #1343 #1449 #1534 #1919 |
| | | #2040 #2087 #2102 #2128 |
| | | #3013 #3511 #371 #3765 |
| | | #387 #471 #473 #508 #777 |
| | | #790 #877 #976 |
| 2964C > T | | #1024 |
| 2967C > T | | #1017 #1055 #1260 #1273 |
| | | #1343 #1449 #1534 #1919 |
| | | #2040 #2087 #2128 #2206 |
| | | #3013 #3511 #371 #3765 |
| | | #387 #471 #473 #777 #877 |
| 2970C > G | | #1055 #1260 #1273 #1343 |
| | | #1449 #1534 #1919 #2040 |
| | | #3013 #3511 #371 #3765 |
| | | #471 #473 #777 #877 |
| 2970C > T | | #129 |
| 2976_2997delins_22nt | 258_265delins_NFFQIKIN | #1010 |
| 2976A > G | | #1017 #1020 #1024 #1055 |
| | | #1158 #1260 #1273 #1286 |
| | | #129 #1343 #1350 #1449 |
| | | #1534 #1570 #1591 #1602 |
| | | #163 #1704 #1919 #2040 |
| | | #2087 #2102 #2107 #2112 |
| | | #2128 #217 #2206 #2208 |
| | | #2320 #2497 #2557 #2731 |
| | | #3013 #3086 #3142 #3511 |
| | | #367 #3765 #387 #442 #471 |
| | | #473 #508 #667 #668 #685 |
| | | #704 #714 #767 #777 #790 |
| | | #877 #976 #985 |
| 2979A > G | | #1017 #1055 #1260 #1273 |
| | | #1343 #1449 #1534 #1919 |
| | | #2040 #2087 #2128 #2206 |
| | | #2557 #3013 #3142 #3511 |
| | | #371 #3765 #387 #471 #473 |
| | | #508 #777 #877 |
| 2982T > C | | #1020 #1024 #1158 #1286 |
| | | #129 #1350 #1570 #1591 |
| | | #1602 #163 #1704 #2102 |
| | | #2107 #2112 #217 #2208 |
| | | #2320 #2731 #3086 #3142 |
| | | #367 #442 #508 #668 #704 |
| | | #714 #790 #976 #985 |
| 2982T > A | | #1273 #1534 |
| 2984C > G | 261S > C | #667 |
| 2991A > G | | #1055 #1260 #1273 #1534 |
| | | #1919 #2128 #2557 #3511 |
| | | #387 |
| 2994A > T | | #1055 #1260 #1273 #1534 |
| | | #1919 #2128 #2557 #3511 |
| | | #387 |
| 3000C > T | | #1017 #1024 #163 #2206 |
| | | #2320 #3142 #508 #790 |
| | | #985 |
| 3000C > A | | #1343 #3013 #777 |
| 3001TCG > AGC | | #1055 #1260 #1273 #1286 |
| | | #1534 #1602 #1919 #2208 |
| | | #2557 #3511 #371 #473 |
| | | #976 |
| 3003G > A | | #1017 #1020 #1158 #129 |
| | | #1350 #1449 #1570 #1591 |
| | | #163 #2040 #2087 #2107 |
| | | #2112 #2128 #217 #2206 |
| | | #2320 #2497 #2731 #3086 |
| | | #3142 #367 #3765 #387 |
| | | #442 #471 #667 #668 #685 |
| | | #704 #714 #790 #877 #985 |
| 3006C > T | | #985 |
| 3007_3012delGACAAT | 269_270delDN | #767 |
| 3012T > C | | #1017 #1020 #1024 #1055 |
| | | #1158 #1260 #1273 #1286 |
| | | #129 #1343 #1350 #1449 |
| | | #1534 #1570 #1591 #1602 |
| | | #163 #1704 #1919 #2040 |
| | | #2087 #2107 #2112 #2128 |
| | | #2141 #217 #2206 #2208 |
| | | #2320 #2497 #2557 #2731 |
| | | #3013 #3086 #3142 #3511 |
| | | #367 #371 #3765 #387 #442 |
| | | #471 #473 #508 #667 #668 |
| | | #685 #704 #714 #777 #790 |
| | | #877 #976 #985 |
| 3018C > T | | #790 |
| 3019_3020insC | N273Kfs277 | #M258 #M258 |
| 3025_3026insC | N255Kfs277 | #M258 #M258 |
| 3028A > T | | #M258 |
| 3032C > A | | #M258 |
| 3035_3536delinsGG | 278P > R | #667 |
| 3036T > C | | #1017 #1020 #1055 #1158 |
| | | #1260 #1273 #1286 #129 |
| | | #1343 #1350 #1534 #163 |
| | | #1919 #2102 #2112 #2141 |
| | | #217 #2206 #2320 #2557 |
| | | #2806 #3142 #3511 #367 |
| | | #371 #387 #442 #473 #508 |
| | | #668 #704 #714 #767 #790 |
| | | #877 #976 #985 #M258 |
| 3043T > G | 281Y > D | #667 |
| 3072C > T | | #1343 |
| 3075T > C | | #1017 #1343 #1704 #2206 |
| | | #3013 #3511 #777 |
| 3078A > G | | #1017 #1055 #1343 #1704 |
| | | #2206 |
| 3078A > C | | #3013 #3511 #777 |
| 3084T > C | | #1055 #1704 |
| 3087C > T | | #1020 #1704 #367 #767 |
| 3093A > G | | #1017 #1055 #2206 |
| 3111C > T | | #1017 |
| 3123A > T | | #1343 #1449 #1602 #2040 |
| | | #2102 #2208 #3142 #3765 |
| | | #387 #777 |
| 3123A > G | | #1055 #1273 #1286 #1602 |
| | | #1704 #2087 #2102 #2141 |
| | | #2208 #3142 #3511 #387 |
| | | #442 #473 #667 #685 #777 |
| | | #877 #976 #M258 |
| 3126C > A | | #1273 #1534 #2557 #471 |
| | | #473 |
| 3129G > A | | #1055 #1273 #1534 #2087 |
| | | #2102 #2208 #2320 #2497 |
| | | #2557 #2806 #3086 #3142 |
| | | #387 #473 #667 #685 #714 |
| | | #777 #M258 |
| 3131G > A | 310R > K | #163 #985 |
| 3137A > G | 312N > S | #3511 |
| 3147C > G | | #1017 #1055 #2102 #2208 |
| | | #387 |
| 3147C > T | | #2087 |
| 3147C > A | | #371 |
| 3151_3152delinsCT | 317N > L | #1010 |
| 3165A > G | | #1055 #1273 #1343 #1350 |
| | | #1449 #1534 #2320 #2557 |
| | | #3013 #3142 #3511 #387 |
| | | #471 #473 #777 #877 |
| 3191C > A | 330T > K | #217 |
| 3192G > A | | #1273 #1286 #1534 |
| 3195_3198delinsCCCC | 332I > P | #217 |
| 3198T > C | | #3765 |
| 3236A > G | 345D > G | #985 |
| 3242A > G | 347E > G | #985 |
| 3247_3248delinsGG | 349Q > G | #985 |
| 3250C > A | 350L > I | #M258 |
| 3254C > G | 351P > R | #985 |
| 3261C > T | | #3765 |
| 3264C > T | | #2087 |
| 3264C > G | | #473 |
| 3267C > T | | #1017 |
| 3276T > C | | #1020 #217 #367 #668 |
| 3287T > C | 362L > P | #2208 |
| 3297C > T | | #1024 #1158 #1343 #1570 |
| | | #1591 #163 #1919 #2107 |
| | | #2320 #2731 #3142 #508 |
| | | #714 #777 #790 #985 |
| 3303A > G | | #1010 #1020 #1024 #1158 |
| | | #1260 #1343 #1570 #1591 |
| | | #1602 #163 #1919 #2107 |
| | | #2112 #217 #2320 #2731 |
| | | #2806 #3086 #3142 #367 |
| | | #508 #667 #668 #704 #714 |
| | | #767 #777 #790 #985 |
| 3309C > T | | #2497 #442 |
| 3312C > T | | #685 |
| 3318G > C | | #1010 #1020 #1158 #1260 |
| | | #1286 #1343 #1350 #1570 |
| | | #1602 #163 #1704 #2107 |
| | | #2141 #217 #2320 #2497 |
| | | #2806 #3086 #3142 #367 |
| | | #442 #508 #668 #685 #777 |
| | | #790 #976 #985 |
| 3318G > T | | #667 #767 |
| 3333C > T | | #976 |
| 3342G > A | | #1024 #1449 #3142 #471 |
| 3351G > A | | #2128 |
| 3357G > A | | #1449 #2040 #3765 #471 |
| | | #714 |
| 3360A > G | | #1010 #1017 #1020 #1024 |
| | | #1055 #1158 #1260 #129 |
| | | #1343 #1350 #1570 #1591 |
| | | #1602 #163 #1704 #1919 |
| | | #2102 #2107 #2112 #217 |
| | | #2208 #2320 #2497 #2806 |
| | | #3013 #3086 #3142 #3511 |
| | | #367 #442 #473 #508 #667 |
| | | #668 #685 #714 #767 #777 |
| | | #790 #976 #M258 |
| 3363A > C | | #1055 #2102 |
| 3375A > C | | #1020 #1024 #1055 #1158 |
| | | #129 #1343 #1350 #1449 |
| | | #1570 #1591 #1602 #163 |
| | | #1704 #1919 #2102 #2107 |
| | | #217 #2208 #2320 #3086 |
| | | #3142 #367 #371 #442 #473 |
| | | #508 #667 #668 #685 #767 |
| | | #777 #790 #976 #985 |
| | | #M258 |
| 3385C > T | | #442 #M258 |
| 3387G > A | | #387 |
| 3390G > A | | #3765 |
| 3405G > A | | #2087 #2102 #2128 #2320 |
| | | #508 |
| 3411G > T | | #1020 #1055 #1260 #1273 |
| | | #1449 #1534 #1919 #2040 |
| | | #2102 #2112 #2208 #2557 |
| | | #3765 #471 #473 #704 #877 |
| 3411G > A | | #1704 |
| 3417C > T | | #1010 #1020 #1158 #1286 |
| | | #1350 #1570 #1591 #1602 |
| | | #163 #2107 #2112 #2320 |
| | | #2497 #2731 #3086 #3142 |
| | | #3511 #367 #442 #508 #668 |
| | | #685 #704 #790 #976 #985 |
| | | #M258 |
| 3417C > A | | #1024 #1055 |
| 3426C > T | | #1704 |
| 3429T > C | | #1704 #M258 |
| 3430ACC > CAG | 410T > Q | #2497 #2731 #1602 #1010 |
| | | #985 #1591 #508 #2112 |
| | | #1350 #668 #367 #1020 |
| | | #1158 #2107 #1570 #704 |
| | | #714 #3086 #3142 #1024 |
| | | #790 #976 #1286 #163 #685 |
| | | #442 #2320 |
| 3430ACC > CAA | 410T > Q | #M258 |
| 3435C > T | | #1602 #790 #976 |
| 3441C > T | | #1449 #2040 #2141 #3765 |
| | | #471 |
| 3444T > C | | #1010 #1017 #1020 #1055 |
| | | #1158 #1260 #1286 #1343 |
| | | #1350 #1449 #1534 #1570 |
| | | #1591 #163 #1919 #2040 |
| | | #2087 #2102 #2107 #2112 |
| | | #2141 #2206 #2208 #2320 |
| | | #2497 #2557 #2731 #3013 |
| | | #3086 #3142 #3511 #367 |
| | | #371 #3765 #387 #442 #471 |
| | | #473 #667 #668 #685 #704 |
| | | #714 #777 #790 #877 #976 |
| | | #985 #M258 |
| 3444T > A | | #2128 |
| 3450G > A | | #1010 #1020 #1024 #1055 |
| | | #1158 #1260 #1286 #1350 |
| | | #1534 #1570 #1602 #163 |
| | | #1704 #1919 #2102 #2107 |
| | | #2112 #2128 #217 #2208 |
| | | #2320 #2497 #2557 #2731 |
| | | #3086 #3142 #367 #442 |
| | | #473 #508 #667 #668 #685 |
| | | #704 #714 #790 #877 #976 |
| | | #985 #M258 |
| 3453C > T | | #2141 |
| 3456T > G | | #1024 #1534 #2128 #2557 |
| | | #508 #877 |
| 3459T > G | | #2141 |
| 3463_3465delinsACA | 421H > T | #2141 |
| 3471C > A | 423S > R | #2141 |
| 3474C > T | | #3142 |
| 3483C > T | | #1260 #1534 #1919 #2102 |
| | | #2208 #2557 #473 #877 |
| 3486G > A | | #1260 #1534 #1919 #2102 |
| | | #2208 #2557 #473 #877 |
| 3490C > T | | #1017 #1273 #1343 #1449 |
| | | #1919 #2040 #2087 #2128 |
| | | #2141 #2206 #2497 #3013 |
| | | #3511 #371 #3765 #387 |
| | | #471 #508 #777 |
| 3495C > T | | #1010 #1020 #1024 #1158 |
| | | #1286 #129 #1350 #1570 |
| | | #1591 #1602 #163 #1704 |
| | | #2107 #2112 #217 #2320 |
| | | #2731 #3086 #3142 #367 |
| | | #442 #508 #667 #668 #685 |
| | | #704 #714 #767 #790 #976 |
| | | #985 #M258 |
| 3496C > A | | #2112 |
| 3498T > G | | #1010 #1020 #1024 #1158 |
| | | #1286 #1343 #1350 #1570 |
| | | #1591 #1602 #163 #1704 |
| | | #2107 #2112 #217 #2320 |
| | | #2731 #3086 #3142 #367 |
| | | #442 #471 #508 #667 #668 |
| | | #685 #704 #714 #767 #777 |
| | | #790 #976 #985 #M258 |
| 3498T > C | | #3765 |
| 3501C > G | | #1158 #1286 #129 #1343 |
| | | #1350 #1570 #1591 #1602 |
| | | #163 #1704 #2107 #2112 |
| | | #217 #2320 #2731 #3086 |
| | | #3142 #367 #442 #508 #667 |
| | | #668 #685 #704 #714 #767 |
| | | #777 #790 #976 #985 |
| | | #M258 |
| 3501C > A | | #1024 |
| 3513C > G | | #1010 #1020 #1024 #1158 |
| | | #1286 #1343 #1350 #1570 |
| | | #1591 #1602 #163 #2107 |
| | | #2112 #217 #2320 #2731 |
| | | #3086 #3142 #367 #442 |
| | | #508 #667 #668 #685 #704 |
| | | #714 #767 #777 #790 #976 |
| | | #985 #M258 |
| 3516C > T | | #1591 #163 #2112 #2320 |
| | | #2806 #3086 #704 #790 |
| | | #985 |
| 3525C > T | | #1343 #777 |
| 3528G > A | | #1260 |
| 3534C > T | | #1010 #1020 #1024 #1158 |
| | | #1286 #129 #1350 #1570 |
| | | #1591 #1602 #163 #1704 |
| | | #2107 #2112 #217 #2320 |
| | | #2731 #2806 #3086 #3142 |
| | | #367 #442 #508 #668 #685 |
| | | #704 #714 #767 #790 #976 |
| | | #985 #M258 |
| 3535T > C | | #1010 #1020 #1024 #1158 |
| | | #1286 #129 #1350 #1570 |
| | | #1591 #1602 #163 #1704 |
| | | #2107 #2112 #217 #2320 |
| | | #2731 #2806 #3086 #3142 |
| | | #367 #442 #508 #668 #685 |
| | | #704 #714 #767 #790 #976 |
| | | #985 #M258 |
| 3537G > A | | #1024 #1260 #129 #508 |
| | | #685 #790 |
| 3539G > A | 446S > N | #1010 #1020 #1024 #1158 |
| | | #1286 #129 #1350 #1570 |
| | | #1591 #1602 #163 #1704 |
| | | #2107 #2112 #217 #2320 |
| | | #2731 #2806 #3086 #3142 |
| | | #367 #442 #508 #668 #685 |
| | | #704 #714 #767 #790 #976 |
| | | #985 #M258 |
| 3541A > G | 447R > G | #2102 |
| 3542G > A | 447R > K | #1010 #1020 #1158 #1286 |
| | | #1343 #1350 #1570 #1591 |
| | | #1602 #163 #1704 #2107 |
| | | #2112 #217 #2320 #2731 |
| | | #2806 #3086 #3142 #367 |
| | | #442 #668 #685 #704 #714 |
| | | #767 #777 #790 #976 #985 |
| | | #M258 |
| 3543A > G | | #1024 #1158 #1350 #1591 |
| | | #1602 #163 #1704 #2320 |
| | | #2806 #3086 #3142 #442 |
| | | #508 #668 #685 #714 #790 |
| | | #976 #985 #M258 |
| 3547_3549delinsCAA | 449N > Q | #129 #2731 #1602 #1010 |
| | | #985 #667 #2806 #M258 |
| | | #217 #767 #1591 #508 |
| | | #1704 #2112 #668 #367 |
| | | #1020 #1158 #2107 #1570 |
| | | #704 #714 #3086 #3142 |
| | | #1024 #790 #976 #1286 |
| | | #163 #685 #442 #2320 |
| 3547_3549delinsCAG | 449N > Q | #1350 |
| 3550A > T | 450T > S | #1010 #1020 #1158 #1286 |
| | | #1350 #1591 #163 #2107 |
| | | #2112 #217 #2320 #2731 |
| | | #2806 #3086 #3142 #367 |
| | | #442 #668 #685 #704 #714 |
| | | #767 #790 #976 #985 |
| | | #M258 |
| 3550A > G | 450T > A | #1343 #1570 #777 |
| 3552T > A | | #1010 #1020 #1024 #1158 |
| | | #1286 #129 #1350 #1570 |
| | | #1591 #1602 #163 #1704 |
| | | #2107 #2112 #217 #2320 |
| | | #2731 #2806 #3086 #3142 |
| | | #367 #442 #508 #668 #685 |
| | | #704 #714 #790 #976 #985 |
| | | #M258 |
| 3552T > G | | #1055 #1260 #2206 |
| 3552_3554delTCC | 451delP | #767 |
| 3553_3555delinsAAT | 451P > N | #2731 #1602 #1010 #985 |
| | | #2806 #217 #1591 #1704 |
| | | #2112 #1350 #668 #367 |
| | | #1020 #1158 #2107 #1570 |
| | | #704 #714 #3086 #3142 |
| | | #790 #976 #1286 #163 #685 |
| | | #442 #2320 |
| 3553_3555delinsGCC | 451P > A | #M258 #508 #1024 |
| 3555A > G | | #1260 #1055 |
| 3555A > C | | #129 |
| 3558T > C | | #1017 #1055 #1260 #1273 |
| | | #1343 #1449 #1534 #1919 |
| | | #2040 #2087 #2102 #2128 |
| | | #2206 #2208 #2497 #2557 |
| | | #3013 #3511 #371 #3765 |
| | | #387 #471 #473 #777 #877 |
| 3560G > A | 453G > E | #2806 |
| 3564C > T | | #1010 #1020 #1158 #1286 |
| | | #129 #1350 #1570 #1591 |
| | | #1602 #163 #1704 #2107 |
| | | #2112 #217 #2320 #3086 |
| | | #3142 #367 #668 #685 #704 |
| | | #714 #767 #790 #976 #985 |
| | | #M258 |
| 3564_3566delCAC | 454T_del | #1024 #508 |
| 3564C > A | | #2806 #442 |
| 3565_3567delinsCTT | 455T > L | #1602 #1010 #985 #767 |
| | | #1591 #1704 #2112 #1350 |
| | | #668 #367 #1020 #1158 |
| | | #2107 #1570 #704 #714 |
| | | #3086 #790 #976 #1286 |
| | | #163 #685 #442 #2320 |
| 3565_3567delinsGTT | 455T > V | #M258 #3142 |
| 3565A > C | 455T > P | #129 |
| 3566C > A | 455T > N | #217 |
| 3567C > T | | #1017 #1273 #877 #2557 |
| | | #1919 #1260 #2208 #2806 |
| 3567_3620delins_54nt | 456_473delins_18aa | #2806 |
| 3568_3569delinsCA | 456T > Q | #1602 #1010 #985 #M258 |
| | | #767 #1591 #508 #1704 |
| | | #2112 #1350 #668 #367 |
| | | #1020 #1158 #2107 #1570 |
| | | #704 #714 #3086 #3142 |
| | | #1024 #976 #1286 #163 |
| | | #685 #442 #2320 |
| 3568_3570delinsCAA | 456T > Q | #790 |
| 3571_3572delinsAT | 457Q > M | #1343 #777 #3511 #3013 |
| | | #2731 |
| 3576A > T | | #777 #129 #1602 #1010 |
| | | #667 #M258 #767 #1591 |
| | | #508 #1704 #2112 #1350 |
| | | #668 #367 #1020 #1158 |
| | | #2107 #1570 #704 #714 |
| | | #3086 #3142 #1024 #790 |
| | | #976 #1286 #163 #685 #442 |
| | | #2320 |
| 3576A > C | | #2102 #371 #1017 #473 |
| | | #1273 #2087 #2206 #877 |
| | | #1534 #2557 #1919 #1260 |
| | | #3765 #471 #387 #2040 |
| | | #1449 #2128 #1343 #3511 |
| | | #3013 #2208 #1055 #2806 |
| 3577A > C | | #129 #1602 #1010 #667 |
| | | #M258 #767 #1591 #508 |
| | | #1704 #2112 #1350 #668 |
| | | #367 #1020 #1158 #2107 |
| | | #1570 #704 #714 #3086 |
| | | #3142 #1024 #790 #976 |
| | | #1286 #163 #685 #442 |
| | | #2320 |
| 3579G > A | | #2206 |
| 3580C > T | | #767 |
| 3582T > A | | #1010 #1020 #1024 #1158 |
| | | #1286 #129 #1350 #1570 |
| | | #1591 #1602 #163 #1704 |
| | | #2107 #2112 #2320 #2731 |
| | | #3086 #3142 #367 #442 |
| | | #508 #667 #668 #685 #704 |
| | | #714 #767 #790 #976 |
| | | #M258 |
| 3584A > T | 461Q > L | #1010 #1020 #1024 #1158 |
| | | #1286 #129 #1350 #1570 |
| | | #1591 #1602 #163 #1704 |
| | | #2107 #2112 #2320 #2731 |
| | | #3086 #3142 #367 #442 |
| | | #508 #667 #668 #685 #704 |
| | | #714 #767 #790 #976 |
| | | #M258 |
| 3589_3590delinsAG | | #2731 #1010 #667 #767 |
| | | #1591 #1704 #2112 #1350 |
| | | #668 #367 #1020 #1158 |
| | | #2107 #1570 #704 #714 |
| | | #790 #1286 #163 #2320 |
| 3589_3591delinsAGC | | #129 #1602 #M258 #508 |
| | | #3086 #3142 #1024 #976 |
| | | #685 #442 |
| 3594G > A | | #1010 #1020 #1024 #1158 |
| | | #1286 #129 #1350 #1449 |
| | | #1570 #1591 #1602 #163 |
| | | #1704 #2107 #2112 #2320 |
| | | #2731 #3086 #3142 #367 |
| | | #442 #508 #667 #668 #685 |
| | | #704 #714 #767 #790 #976 |
| | | #M258 |
| 3597C > T | | #1010 #1020 #1024 #1158 |
| | | #1286 #129 #1350 #1570 |
| | | #1591 #1602 #163 #1704 |
| | | #2107 #2112 #2320 #2731 |
| | | #2806 #3086 #3142 #367 |
| | | #442 #508 #667 #668 #685 |
| | | #704 #714 #767 #790 #976 |
| | | #M258 |
| 3597C > A | | #1343 |
| 3601_3603delinsCCC | 467A > P | #129 #2731 #1010 #667 |
| | | #M258 #767 #508 #1704 |
| | | #2112 #1350 #668 #367 |
| | | #1020 #1158 #2107 #1570 |
| | | #704 #714 #3086 #3142 |
| | | #1024 #790 #976 #1286 |
| | | #163 #685 #442 #2320 |
| 3601_3603delinsCCA | 467A > P | #1602 |
| 3603G > A | | #2102 #2206 #1919 #1260 |
| | | #3765 #471 #387 #1449 |
| | | #2128 #1343 #777 |
| 3605_3606delinsCC | 468S > T | #2731 #1602 #1010 #667 |
| | | #M258 #767 #508 #1704 |
| | | #2112 #1350 #668 #367 |
| | | #1020 #1158 #2107 #1570 |
| | | #704 #714 #3086 #3142 |
| | | #1024 #790 #976 #1286 |
| | | #163 #685 #442 #2320 |
| 3605_3606delinsCA | 468S > T | #129 #2806 |
| 3607_3608delinsAG | 469D > S | #129 #2731 #1010 #667 |
| | | #2806 #M258 #767 #508 |
| | | #1704 #2112 #1350 #668 |
| | | #367 #1020 #1158 #2107 |
| | | #1570 #704 #714 #3142 |
| | | #1024 #790 #976 #1286 |
| | | #163 #685 #442 #2320 |
| 3607G > A | 469D > N | #1602 #3086 |
| 3612T > G | 470I > M | #1010 #1020 #1024 #1158 |
| | | #1286 #129 #1350 #1570 |
| | | #1602 #163 #1704 #2107 |
| | | #2112 #2320 #2731 #3086 |
| | | #3142 #367 #442 #508 #667 |
| | | #668 #685 #704 #714 #767 |
| | | #790 #976 #M258 |
| 3613_3615delinsTCT | 471R > S | #129 #2731 #1602 #1010 |
| | | #667 #M258 #767 #508 |
| | | #1704 #2112 #1350 #668 |
| | | #367 #1020 #1158 #2107 |
| | | #1570 #704 #714 #3086 |
| | | #3142 #1024 #790 #976 |
| | | #1286 #163 #685 #442 |
| | | #2320 |
| 3616_3618delinsCTT | 472D > L | #129 #2731 #1602 #1010 |
| | | #667 #M258 #767 #508 |
| | | #1704 #2112 #1350 #668 |
| | | #367 #1020 #1158 #2107 |
| | | #1570 #704 #714 #3086 |
| | | #3142 #1024 #790 #976 |
| | | #1286 #163 #685 #442 |
| | | #2320 |
| 3618C > T | | #2141 |
| 3621G > A | 473Q > H | #1010 #1020 #1024 #1158 |
| | | #1286 #129 #1350 #1570 |
| | | #1602 #163 #1704 #2107 |
| | | #2112 #2320 #2806 #3086 |
| | | #3142 #367 #442 #508 #667 |
| | | #668 #685 #704 #714 #767 |
| | | #790 #976 #M258 |
| 3621G > C | | #2731 |
| 3622T > G | 474S > A | #1010 #1020 #1024 #1158 |
| | | #1286 #129 #1350 #1570 |
| | | #1602 #163 #1704 #2107 |
| | | #2112 #2320 #2731 #2806 |
| | | #3086 #3142 #367 #442 |
| | | #508 #667 #668 #685 #704 |
| | | #714 #767 #790 #976 |
| | | #M258 |
| 3624T > C | | #2806 |
| 3626_3627delins > AA | 475R > K | #129 #2731 #1602 #1010 |
| | | #667 #M258 #508 #1704 |
| | | #2112 #1350 #668 #367 |
| | | #1020 #1158 #2107 #1570 |
| | | #704 #714 #3086 #3142 |
| | | #1024 #790 #976 #1286 |
| | | #163 #685 #442 #2320 |
| 3627G > A | | #1343 #777 #2806 |
| 3628_3629delinsGT | 476N > V | #2806 |
| 3630C > T | | #442 |
| 3636T > G | | #1010 #1024 #1158 #1286 |
| | | #129 #1350 #1570 #1602 |
| | | #163 #1704 #2107 #2112 |
| | | #217 #2320 #2731 #2806 |
| | | #3086 #3142 #367 #442 |
| | | #508 #667 #668 #685 #704 |
| | | #714 #790 #976 #M258 |
| 3636T > A | | #1020 |
| 3645C > T | | #1020 #1024 #1158 #1286 |
| | | #1350 #1570 #1602 #163 |
| | | #1704 #2107 #2112 #217 |
| | | #2320 #2731 #2806 #3086 |
| | | #3142 #367 #442 #508 #667 |
| | | #668 #685 #704 #714 #790 |
| | | #976 #M258 |
| 3645C > G | | #129 |
| 3648T > C | | #1020 #1024 #1158 #1286 |
| | | #1350 #1570 #1602 #163 |
| | | #1704 #2107 #2112 #217 |
| | | #2320 #2731 #2806 #3086 |
| | | #3142 #367 #442 #508 #667 |
| | | #668 #685 #704 #714 #790 |
| | | #976 #M258 |
| 3651C > T | | #129 #2141 |
| 3652C > A | | #1020 #1024 #1158 #1286 |
| | | #1350 #1570 #1602 #163 |
| | | #1704 #2107 #2112 #217 |
| | | #2320 #2731 #2806 #3086 |
| | | #3142 #367 #442 #508 #667 |
| | | #668 #685 #704 #714 #790 |
| | | #976 #M258 |
| 3654C > A | | #1020 #1024 #1158 #1286 |
| | | #1350 #1570 #1602 #163 |
| | | #1704 #2107 #2112 #217 |
| | | #2320 #2731 #2806 #3086 |
| | | #3142 #367 #442 #508 #667 |
| | | #668 #685 #704 #714 #790 |
| | | #976 #M258 |
| 3657G > A | | #1024 |
| 3660G > A | | #371 |
| 3663A > T | | #1020 #1024 #1158 #1286 |
| | | #129 #1350 #1570 #1602 |
| | | #163 #1704 #2107 #2112 |
| | | #217 #2320 #2731 #2806 |
| | | #3086 #3142 #367 #442 |
| | | #508 #667 #668 #685 #704 |
| | | #714 #790 #976 #M258 |
| 3664_3666delinsTTG | 488V > L | #129 #3086 #1024 |
| 3664_3666delinsCTG | 488V > L | #2731 #1602 #667 #M258 |
| | | #217 #508 #1704 #2112 |
| | | #1350 #668 #367 #1020 |
| | | #1158 #2107 #1570 #704 |
| | | #714 #3142 #790 #976 |
| | | #1286 #163 #685 #442 |
| | | #2320 |
| 3664G > T | 488V > L | #2806 |
| 3672G > A | | #1017 #1350 |
| 3673_3675delinsCAG | 491T > Q | #129 #2731 #1602 #667 |
| | | #2806 #M258 #217 #508 |
| | | #1704 #2112 #1350 #668 |
| | | #367 #1020 #1158 #2107 |
| | | #1570 #704 #714 #3086 |
| | | #3142 #1024 #790 #976 |
| | | #1286 #163 #685 #442 |
| | | #2320 |
| 3676T > G | 492S > A | #1020 #1024 #1055 #1158 |
| | | #1273 #1286 #129 #1343 |
| | | #1350 #1449 #1534 #1570 |
| | | #1602 #163 #1704 #1919 |
| | | #2040 #2087 #2102 #2107 |
| | | #2112 #217 #2208 #2320 |
| | | #2497 #2557 #2731 #2806 |
| | | #3013 #3086 #3142 #3511 |
| | | #367 #442 #473 #508 #667 |
| | | #668 #685 #704 #714 #777 |
| | | #790 #877 #976 #M258 |
| 3676T > C | 492S > P | #3765 #387 #471 |
| 3678T > A | | #1020 #1024 #1158 #1286 |
| | | #129 #1350 #1570 #1602 |
| | | #163 #1704 #2107 #2112 |
| | | #217 #2320 #2731 #2806 |
| | | #3086 #3142 #367 #442 |
| | | #508 #667 #668 #685 #704 |
| | | #714 #790 #976 #M258 |
| 3679_3681delinsAAC | 493A > N | #129 #2731 #1602 #667 |
| | | #2806 #M258 #217 #508 |
| | | #1704 #2112 #1350 #668 |
| | | #367 #1020 #1158 #2107 |
| | | #1570 #704 #714 #3086 |
| | | #1024 #790 #976 #1286 |
| | | #163 #685 #442 |
| 3679_3681delinsAGC | 493A > S | #3142 |
| 3679G > A | 493A > T | #2320 |
| 3681G > A | | #2128 |
| 3684T > C | | #1020 #1024 #1158 #1273 |
| | | #1286 #129 #1343 #1350 |
| | | #1570 #1602 #163 #1704 |
| | | #2087 #2102 #2107 #2112 |
| | | #217 #2497 #2557 #2731 |
| | | #2806 #3013 #3086 #3142 |
| | | #3511 #367 #442 #508 #667 |
| | | #668 #685 #704 #714 #777 |
| | | #790 #877 #976 |
| 3684T > A | 494D > E | #M258 |
| 3687C > A | 495N > K | #767 |
| 3689A > G | 496N > S | #2102 #2497 |
| 3690C > T | | #2806 #3086 |
| 3693C > T | | #1024 #2128 |
| 3693delC | N497Kfs511 | #2112 |
| 3696T > C | | #1020 #1024 #1158 #1286 |
| | | #129 #1350 #1570 #1591 |
| | | #1602 #163 #1704 #2107 |
| | | #2112 #217 #2731 #2806 |
| | | #3086 #3142 #367 #442 |
| | | #508 #667 #668 #685 #704 |
| | | #714 #790 #976 #M258 |
| 3697_3699delinsAAC | 499E > N | #129 #2731 #1602 #667 |
| | | #2806 #M258 #217 #1591 |
| | | #508 #1350 #668 #367 |
| | | #1020 #1158 #2107 #1570 |
| | | #704 #714 #3086 #3142 |
| | | #1024 #790 #976 #1286 |
| | | #163 #685 #442 |
| 3697_3699delinsAAT | 499E > N | #1704 |
| 3699A > T | 499E > D | #1343 #777 #3511 #3013 |
| 3699A > G | | #2497 #2102 #2087 |
| 3701_3702delinsTT | 500Y > F | #129 #2731 #1602 #667 |
| | | #2806 #M258 #217 #1591 |
| | | #1704 #1350 #668 #367 |
| | | #1020 #1158 #2107 #1570 |
| | | #704 #714 #3086 #3142 |
| | | #1024 #790 #976 #1286 |
| | | #163 #685 #442 #2320 |
| 3702C > T | | #371 #1534 |
| 3703_3705delinsCCC | 501S > P | #129 #2731 #1602 #667 |
| | | #2806 #M258 #217 #1591 |
| | | #1704 #1350 #668 #367 |
| | | #1020 #1158 #2107 #1570 |
| | | #704 #714 #3086 #3142 |
| | | #1024 #790 #976 #1286 |
| | | #163 #685 #442 #2320 |
| 3711T > A | | #217 |
| 3713_3714delinsCG | 504G > A | #667 #M258 #767 #1591 |
| | | #1704 #1350 #668 #367 |
| | | #1158 #704 #714 #3142 |
| | | #1024 #790 #976 #1286 |
| | | #163 #685 #442 #2320 |
| 3713G > C | 504G > A | #2731 #1602 #2806 #1020 |
| | | #2107 #1570 #3086 |
| 3714A > T | | #2497 |
| 3720C > A | | #1020 #1024 #1158 #1286 |
| | | #1350 #1570 #1591 #1602 |
| | | #163 #1704 #2107 #2112 |
| | | #2320 #2731 #2806 #3086 |
| | | #3142 #367 #442 #667 #668 |
| | | #685 #704 #714 #767 #790 |
| | | #976 #M258 |
| 3723G > A | | #371 |
| 3726C > T | | #1020 #1158 #1286 #1350 |
| | | #1570 #1591 #1602 #163 |
| | | #1704 #2107 #2320 #2731 |
| | | #2806 #3086 #3142 #367 |
| | | #442 #667 #668 #685 #704 |
| | | #714 #767 #790 #976 |
| | | #M258 |
| 3728A > C | | |
| 3729C > T | | #1020 #1158 #1286 #1350 |
| | | #1570 #1591 #163 #1704 |
| | | #2107 #2112 #2320 #2731 |
| | | #2806 #3086 #3142 #367 |
| | | #442 #667 #668 #685 #704 |
| | | #714 #767 #790 #976 |
| | | #M258 |
| 3732C > A | | #1020 #1158 #1286 #1350 |
| | | #1570 #1591 #163 #1704 |
| | | #2107 #2112 #2731 #2806 |
| | | #3086 #3142 #367 #667 |
| | | #668 #685 #704 #714 #767 |
| | | #790 #976 |
| 3733_3734insT | | #2112 |
| 3734_3756delins_26nt | 511_518delinsGYKVSTKW | #2112 |
| 3738C > A | | #1343 #2087 #2102 #2497 |
| | | #777 |
| 3738C > T | | #387 #508 |
| 3739_3741delinsCGG | | #3511 #3013 #667 #2806 |
| | | #M258 #767 #1591 #1704 |
| | | #1350 #668 #367 #1020 |
| | | #1158 #2107 #1570 #704 |
| | | #714 #3086 #3142 #790 |
| | | #976 #1286 #163 #685 #442 |
| | | #2320 |
| 3741A > T | 513R > S | #2731 |
| 3747T > G | | #1020 #1158 #1286 #1350 |
| | | #1570 #1591 #163 #2107 |
| | | #2320 #2731 #2806 #3013 |
| | | #3086 #3142 #367 #442 |
| | | #667 #668 #685 #704 #714 |
| | | #767 #790 #976 #M258 |
| 3747T > A | | |
| 3748C > T | | #1020 #1055 #1158 #1286 |
| | | #129 #1350 #1570 #1591 |
| | | #163 #2107 #2112 #2320 |
| | | #2731 #2806 #3013 #3086 |
| | | #3142 #367 #442 #508 #667 |
| | | #668 #685 #704 #714 #767 |
| | | #790 #976 #M258 |
| 3751_3753delinsATT | 517V > I | #2731 |
| 3753G > T | | #3013 #667 #2806 #M258 |
| | | #767 #1591 #1350 #668 |
| | | #367 #1020 #1158 #2107 |
| | | #1570 #704 #714 #3086 |
| | | #3142 #790 #976 #1286 |
| | | #163 #685 #442 #2320 |
| | | #1449 |
| 3753G > A | | #1449 |
| 3756T > C | | #129 #508 |
| 3759G > A | | #1020 #1158 #1286 #1350 |
| | | #1570 #1591 #163 #1704 |
| | | #1919 #2107 #2320 #2731 |
| | | #2806 #3013 #3086 #3142 |
| | | #3511 #367 #442 #667 #685 |
| | | #704 #714 #767 #790 #976 |
| | | #M258 |
| 3762C > A | | #1020 #1158 #1286 #1570 |
| | | #1591 #163 #1704 #2107 |
| | | #2112 #2320 #2731 #2806 |
| | | #3013 #3086 #3142 #3511 |
| | | #367 #442 #667 #685 #704 |
| | | #714 #767 #790 #976 |
| | | #M258 |
| 3762C > G | | #1350 |
| 3763_3765delinsACA | 521P > T | #1343 #777 |
| 3765G > A | | #3511 #3013 #2731 #667 |
| | | #2806 #M258 #217 #767 |
| | | #1591 #1704 #2112 #1350 |
| | | #367 #1020 #1158 #2107 |
| | | #1570 #704 #714 #3086 |
| | | #3142 #790 #976 #1286 |
| | | #163 #685 #442 #2320 |
| 3765G > T | | #508 #1024 |
| 3768C > T | | #1020 #1024 #1158 #1286 |
| | | #1350 #1570 #1591 #163 |
| | | #1704 #2107 #2112 #217 |
| | | #2320 #2731 #2806 #3086 |
| | | #3142 #367 #442 #508 #667 |
| | | #668 #685 #704 #714 #767 |
| | | #790 #976 #M258 |
| 3774A > C | | #1017 #1020 #1024 #1055 |
| | | #1158 #1260 #1273 #1286 |
| | | #129 #1343 #1350 #1449 |
| | | #1534 #1570 #1591 #163 |
| | | #1704 #1919 #2040 #2087 |
| | | #2102 #2107 #2112 #2128 |
| | | #2141 #217 #2206 #2208 |
| | | #2320 #2497 #2557 #2731 |
| | | #2806 #3013 #3086 #3142 |
| | | #3511 #367 #371 #3765 |
| | | #387 #442 #471 #473 #508 |
| | | #667 #668 #685 #704 #714 |
| | | #767 #777 #790 #877 #976 |
| | | #M258 |
| 3777C > T | | #1020 #1024 #1704 #2141 |
| | | #2806 #3086 #3142 #M258 |
| 3780C > T | | #2806 #3086 |
| 3783G > A | | #1024 #1158 #1286 #1350 |
| | | #1570 #1591 #163 #2107 |
| | | #2112 #2141 #217 #2320 |
| | | #2731 #2806 #3013 #3086 |
| | | #3511 #367 #442 #508 #668 |
| | | #685 #704 #714 #767 #790 |
| | | #976 |
| 3786C > T | | #1020 #1704 #3142 #442 |
| | | #714 #M258 |
| 3789T > C | | #1020 #1704 #3142 #714 |
| | | #M258 |
| 3795A > G | | #1449 |
| 3795_3796insGAA | 531_533insE | #1570 |
| 3800T > A | 533F > Y | #1343 #3013 #3511 #777 |
| 3804T > C | | #1020 #1024 #1158 #1286 |
| | | #129 #1350 #1449 #1570 |
| | | #1591 #163 #1704 #2107 |
| | | #2112 #217 #2320 #2806 |
| | | #3086 #3142 #367 #442 |
| | | #508 #668 #685 #704 #714 |
| | | #767 #790 #976 #M258 |
| 3807T > C | | #1020 #1024 #1158 #1286 |
| | | #129 #1350 #1570 #1591 |
| | | #163 #1704 #2107 #2112 |
| | | #217 #2320 #3086 #3142 |
| | | #367 #442 #508 #668 #685 |
| | | #704 #714 #767 #790 #976 |
| | | #M258 |
| 3808_3809delinsAT | 536Q > M | #129 #M258 #217 #767 |
| | | #1591 #508 #1704 #2112 |
| | | #1350 #668 #367 #1020 |
| | | #1158 #2107 #1570 #704 |
| | | #714 #3086 #3142 #1024 |
| | | #790 #976 #1286 #163 #685 |
| | | #442 #2320 |
| 3810G > A | | #1055 #1449 #1534 #2040 |
| | | #2087 #2206 #2208 #2557 |
| | | #371 #3765 #471 #877 |
| 3810G > C | 536Q > H | #2497 |
| 3811_3813delinsCAT | 537S > H | #129 #M258 #217 #1591 |
| | | #508 #1704 #2112 #1350 |
| | | #668 #367 #1020 #1158 |
| | | #2107 #1570 #704 #714 |
| | | #3086 #3142 #1024 #790 |
| | | #976 #1286 #163 #685 #442 |
| | | #2320 |
| 3811_3813delinsCCT | 537S > P | #767 |
| 3816G > A | | #1020 #1024 #1158 #1286 |
| | | #129 #1350 #1570 #1591 |
| | | #163 #1704 #2107 #2112 |
| | | #217 #2320 #3086 #3142 |
| | | #367 #442 #508 #668 #685 |
| | | #704 #714 #767 #790 #976 |
| | | #M258 |
| 3817_3819delinsACC | 539V > T | #129 #M258 #217 #767 |
| | | #1591 #508 #2112 #1350 |
| | | #668 #367 #1020 #1158 |
| | | #2107 #1570 #704 #714 |
| | | #3086 #3142 #1024 #790 |
| | | #976 #1286 #163 #685 #442 |
| | | #2320 |
| 3817_3819delinsACA | 539V > T | #1704 |
| 3820C > T | | #1704 |
| 3822C > G | | #1020 #1024 #1158 #1286 |
| | | #1350 #1570 #1591 #163 |
| | | #1704 #2107 #2112 #217 |
| | | #2320 #3086 #3142 #367 |
| | | #442 #508 #668 #685 #704 |
| | | #714 #767 #790 #976 |
| | | #M258 |
| 3822C > A | | #129 |
| 3825C > A | | #1020 #1024 #1158 #1260 |
| | | #1286 #1350 #1570 #1591 |
| | | #163 #1704 #2107 #2112 |
| | | #217 #2320 #3086 #3142 |
| | | #367 #442 #508 #668 #685 |
| | | #704 #714 #767 #790 #976 |
| | | #M258 |
| 3828T > C | | #1343 #3013 #777 |
| 3831G > A | | #371 #1017 #473 #1273 |
| | | #2206 #2128 #1343 #777 |
| | | #3511 #3013 |
| 3831G > T | | #M258 #217 #767 #1591 |
| | | #508 #1704 #2112 #1350 |
| | | #668 #367 #1020 #1158 |
| | | #2107 #1570 #704 #714 |
| | | #3086 #3142 #1024 #790 |
| | | #976 #1286 #163 #685 #442 |
| | | #2320 |
| 3834G > A | | #1017 #1020 #1024 #1158 |
| | | #1273 #1286 #1343 #1350 |
| | | #1570 #1591 #163 #1704 |
| | | #2107 #2112 #217 #2206 |
| | | #2320 #2806 #3013 #3086 |
| | | #3142 #3511 #367 #371 |
| | | #442 #473 #508 #668 #685 |
| | | #704 #714 #767 #777 #790 |
| | | #976 #M258 |
| 3835C > G | 545Q > E | #1024 #3142 #508 #767 |
| 3839G > A | 546G > D | #1017 #1273 #1343 #3013 |
| | | #3511 #473 #777 |
| 3840C > A | | #M258 #217 #767 #1591 |
| | | #508 #1704 #2112 #1350 |
| | | #668 #367 #1020 #1158 |
| | | #2107 #1570 #704 #714 |
| | | #3086 #3142 #1024 #790 |
| | | #976 #1286 #163 #685 #442 |
| | | #2320 |
| 3840C > T | | #2128 #1343 |
| 3841T > A | 547S > T | #1020 #1024 #1158 #1286 |
| | | #1350 #1570 #1591 #163 |
| | | #1704 #2107 #2112 #217 |
| | | #2320 #3086 #3142 #367 |
| | | #442 #508 #668 #685 #704 |
| | | #714 #767 #790 #976 |
| | | #M258 |
| 3843A > G | | #1273 #1343 #3013 #3511 |
| | | #777 |
| 3843A > T | | #2320 #442 #M258 |
| 3844_3846delinsAAT | 548E > N | #217 #767 #1591 #508 |
| | | #1704 #2112 #1350 #668 |
| | | #367 #1020 #1158 #2107 |
| | | #1570 #704 #714 #3086 |
| | | #1024 #790 #976 #1286 |
| | | #163 #685 |
| 3845_3846delinsGA | 548E > G | #1017 #473 #1273 #1343 |
| | | #777 #3511 #3013 #M258 |
| | | #442 |
| 3844_3846delinsAAA | 548E > K | #2320 |
| 3844_3846delinsACT | 548E > T | #3142 |
| 3847A_3849delinsGCT | 549K > A | #217 #767 #1591 #508 |
| | | #2112 #1350 #668 #367 |
| | | #1158 #2107 #1570 #704 |
| | | #714 #1024 #790 #976 |
| | | #1286 #163 |
| 3847A_3849delinsTCT | 549K > S | #3142 |
| 3847A_3849delinsTGC | 549K > C | #2320 |
| 3848A > G | 549K > R | #M258 #442 |
| 3847_3849delinsGCC | 549K > A | #1704 #1020 #3086 #685 |
| 3850_3852delinsGAC | 550T > D | #M258 #442 |
| 3851_3852delinsAC | 550T > N | #217 #767 #1591 #1704 |
| | | #2112 #1350 #668 #367 |
| | | #1020 #1158 #2107 #1570 |
| | | #704 #714 #3086 #3142 |
| | | #790 #976 #1286 #163 #685 |
| | | #2320 |
| 3852A > T | | #1017 #473 #1273 #1343 |
| | | #777 #3511 #3013 |
| 3852A > C | | #129 #2806 #508 #1024 |
| 3853_3855delinsGAC | 551N > D | #217 #1591 #1704 #2112 |
| | | #1350 #668 #367 #1020 |
| | | #1158 #2107 #1570 #704 |
| | | #714 #3086 #790 #976 |
| | | #1286 #163 #685 #2320 |
| 3855T > C | | #129 #M258 #767 #508 |
| | | #3142 #1024 #442 |
| 3857T > C | 552V > A | #129 #M258 #217 #767 |
| | | #1591 #508 #1704 #2112 |
| | | #1350 #668 #367 #1020 |
| | | #1158 #2107 #1570 #704 |
| | | #714 #3086 #3142 #1024 |
| | | #790 #976 #1286 #163 #685 |
| | | #442 #2320 |
| 3858G > A | | #217 #767 #367 |
| 3859_3864del | 553_554delVD | #2128 |
| 3861C > T | | #M258 #217 #1591 #508 |
| | | #1704 #2112 #1350 #668 |
| | | #367 #1020 #1158 #2107 |
| | | #1570 #704 #714 #3086 |
| | | #3142 #1024 #790 #976 |
| | | #1286 #163 #685 #442 |
| | | #2320 |
| 3861C > A | 553D > E | #129 #767 |
| 3862_3864delinsTTG | 554I > L | #129 #M258 #217 #767 |
| | | #1591 #508 #1704 #2112 |
| | | #1350 #668 #367 #1020 |
| | | #1158 #2107 #1570 #704 |
| | | #714 #3086 #3142 #1024 |
| | | #790 #976 #1286 #163 #685 |
| | | #442 #2320 |
| 3867A > C | 555E > D | #1024 #1158 #1286 #1350 |
| | | #1570 #1591 #163 #2107 |
| | | #2112 #217 #2320 #3086 |
| | | #367 #442 #508 #668 #685 |
| | | #704 #714 #790 #976 |
| | | #M258 |
| 3868_3870delinsCAT | 556K > H | #3142 |
| 3870G > T | 556K > N | #1020 #1024 #1158 #1286 |
| | | #129 #1350 #1570 #1591 |
| | | #163 #1704 #2107 #2112 |
| | | #217 #2320 #3086 #3142 |
| | | #367 #442 #508 #668 #685 |
| | | #704 #714 #767 #790 #976 |
| | | #M258 |
| 3873C > T | | #1286 #1591 #1704 #2320 |
| | | #3511 |
| 3885C > T | | #1024 #1158 #1286 #129 |
| | | #1350 #1570 #1591 #163 |
| | | #1704 #2107 #2112 #217 |
| | | #2320 #3086 #3142 #367 |
| | | #442 #668 #685 #704 #714 |
| | | #767 #790 #976 #M258 |
| 3887A > G | 562E > G | #2141 |
| 3891G > A | | #1010 #1020 #1024 #1158 |
| | | #1286 #1350 #1570 #1591 |
| | | #163 #1704 #2107 #2112 |
| | | #217 #2320 #3086 #3142 |
| | | #367 #387 #442 #668 #685 |
| | | #704 #714 #767 #790 #976 |
| | | #M258 |
| 3898_3900delinsCGC | | #1010 #M258 #217 #767 |
| | | #1591 #2112 #1350 #668 |
| | | #367 #1158 #2107 #1570 |
| | | #704 #3086 #1024 #790 |
| | | #976 #1286 #163 #685 #442 |
| | | #2320 |
| 3903A > C | | #1010 #1017 #1020 #1024 |
| | | #1055 #1158 #1260 #1273 |
| | | #1286 #129 #1343 #1350 |
| | | #1449 #1534 #1570 #1591 |
| | | #163 #1704 #1919 #2040 |
| | | #2087 #2102 #2107 #2112 |
| | | #2128 #2141 #217 #2206 |
| | | #2208 #2320 #2497 #2557 |
| | | #2806 #3013 #3086 #3142 |
| | | #3511 #367 #371 #3765 |
| | | #387 #442 #471 #473 #668 |
| | | #685 #704 #714 #767 #777 |
| | | #790 #877 #976 #M258 |
| 3906C > A | | #1024 #3086 #508 |
| 3906C > T | | #3142 |
| 3912C > T | | #1024 #3086 #3142 #508 |
| 3912C > A | | #976 |
| 3915G > A | | #1024 #1158 #3086 #508 |
| 3915G > C | | #2141 |
| 3918T > C | | #2141 |
| 3921G > A | | #129 #371 |
| 3930T > C | | #1010 #1158 #1286 #1350 |
| | | #1570 #1591 #163 #1704 |
| | | #2107 #2112 #217 #2320 |
| | | #2806 #3086 #3142 #367 |
| | | #442 #508 #667 #668 #685 |
| | | #704 #714 #767 #790 #976 |
| | | #985 #M258 |
| 3933T > A | | #1010 #1024 #1158 #1286 |
| | | #1350 #1570 #1591 #163 |
| | | #1704 #2107 #2112 #217 |
| | | #2320 #2731 #2806 #3086 |
| | | #3142 #367 #442 #508 #667 |
| | | #668 #685 #704 #714 #767 |
| | | #790 #976 #985 #M258 |
| 3933T > G | | #1020 |
| 3934T > G | 578S > A | #2497 #1449 #1020 |
| 3935C > A | 578S > Y | #1010 #985 #667 #2806 |
| | | #M258 #217 #767 #1591 |
| | | #508 #1704 #2112 #1350 |
| | | #668 #367 #1158 #2107 |
| | | #1570 #704 #714 #3086 |
| | | #1024 #790 #976 #1286 |
| | | #163 #685 #442 #2320 |
| 3934_3935delinsAA | 578S > N | #3142 |
| 3939A > G | | #1010 #985 #667 #2806 |
| | | #M258 #217 #767 #1591 |
| | | #508 #1704 #2112 #1350 |
| | | #668 #367 #1020 #1158 |
| | | #2107 #1570 #704 #714 |
| | | #3086 #3142 #1024 #790 |
| | | #976 #1286 #685 #442 |
| | | #2320 |
| 3939A > C | | #163 |
| 3942T > A | | #1010 #985 #667 #2806 |
| | | #M258 #217 #767 #1591 |
| | | #508 #1704 #2112 #1350 |
| | | #668 #367 #1020 #1158 |
| | | #2107 #1570 #704 #714 |
| | | #3086 #3142 #1024 #790 |
| | | #976 #1286 #163 #685 #442 |
| | | #2320 |
| 3944_3945delinsAT | 581T > N | #1010 #985 #667 #2806 |
| | | #M258 #217 #767 #1591 |
| | | #508 #1704 #2112 #1350 |
| | | #668 #367 #1020 #1158 |
| | | #2107 #1570 #704 #714 |
| | | #3086 #3142 #1024 #790 |
| | | #976 #1286 #163 #685 #442 |
| | | #2320 |
| 3948C > T | | #1010 #985 #667 #2806 |
| | | #M258 #217 #767 #1591 |
| | | #508 #1704 #2112 #1350 |
| | | #668 #367 #1020 #1158 |
| | | #2107 #1570 #704 #714 |
| | | #3086 #3142 #1024 #790 |
| | | #976 #1286 #163 #685 #442 |
| | | #2320 |
| 3949_3951_delinsTTG | | #1010 #985 #667 #2806 |
| | | #M258 #217 #767 #1591 |
| | | #508 #1704 #2112 #1350 |
| | | #668 #367 #1020 #1158 |
| | | #2107 #1570 #704 #714 |
| | | #3086 #3142 #1024 #790 |
| | | #976 #1286 #163 #685 #442 |
| | | #2320 |
| 3951C > T | | #3013 |
| 3954G > A | | #1343 #777 #3013 #1010 |
| | | #985 #667 #2806 #M258 |
| | | #217 #767 #1591 #508 |
| | | #1704 #2112 #668 #367 |
| | | #1020 #1158 #2107 #1570 |
| | | #704 #714 #3086 #3142 |
| | | #1024 #790 #976 #1286 |
| | | #163 #685 #442 #2320 |
| 3956_3957delinsAC | 585R > N | #1010 #985 #667 #2806 |
| | | #M258 #217 #767 #1591 |
| | | #508 #1704 #2112 #668 |
| | | #367 #1020 #1158 #2107 |
| | | #1570 #704 #714 #3086 |
| | | #3142 #1024 #790 #976 |
| | | #1286 #163 #685 #442 |
| | | #2320 |
| 3957A > C | 585R > S | #2497 #2102 #371 #1017 |
| | | #473 #1273 #2087 #2206 |
| | | #877 #1534 #2557 #1919 |
| | | #1260 #3765 #471 #387 |
| | | #2040 #1449 #2128 #1343 |
| | | #777 #3511 #3013 #2208 |
| | | #1055 #1350 |
| 3958_3960delinsTCA | 586G > S | #1010 #985 #667 #2806 |
| | | #M258 #217 #767 #1591 |
| | | #508 #1704 #2112 #668 |
| | | #367 #1020 #1158 #2107 |
| | | #1570 #704 #714 #3086 |
| | | #3142 #1024 #790 #976 |
| | | #1286 #163 #685 #442 |
| | | #2320 |
| 3963C > T | | #1010 #985 #667 #2806 |
| | | #217 #767 #1591 #2112 |
| | | #668 #367 #1158 #2107 |
| | | #1570 #704 #714 #3086 |
| | | #3142 #1024 #790 #976 |
| | | #163 #685 #2320 |
| 3965_3966delinsCT | 588R > T | #985 #667 #2806 #M258 |
| | | #217 #767 #1591 #508 |
| | | #1704 #2112 #668 #367 |
| | | #1020 #1158 #2107 #1570 |
| | | #704 #714 #3086 #3142 |
| | | #1024 #790 #976 #1286 |
| | | #163 #685 #442 #2320 |
| 3959G > C | 588R > T | #2497 #2102 #371 #1017 |
| | | #473 #1273 #2087 #2206 |
| | | #877 #1534 #2557 #1919 |
| | | #1260 #3765 #471 #387 |
| | | #2040 #1449 #2128 #2141 |
| | | #1343 #777 #3511 #3013 |
| | | #2208 #1055 #1350 |
| 3967_3969delinsGGT | 589Q > G | #985 #667 #2806 #217 #767 |
| | | #1591 #1704 #2112 #668 |
| | | #367 #1020 #1158 #2107 |
| | | #1570 #704 #714 #3086 |
| | | #3142 #790 #976 #1286 |
| | | #163 #685 #442 #2320 |
| 3968A > G | 589Q > R | #2731 |
| 3967_3969delinsGCT | 589Q > A | #M258 #508 #1024 |
| 3970G > C | 590A > P | #1020 #1158 #1286 #1570 |
| | | #1591 #163 #1704 #2107 |
| | | #2112 #217 #2320 #2806 |
| | | #3086 #3142 #367 #442 |
| | | #667 #668 #685 #704 #714 |
| | | #767 #790 #976 #985 |
| | | #M258 |
| 3972A > G | | #M258 |
| 3973G > A | 591A > T | #985 #667 #2806 #217 #767 |
| | | #1591 #508 #1704 #2112 |
| | | #668 #367 #1020 #1158 |
| | | #2107 #1570 #704 #714 |
| | | #3086 #3142 #1024 #790 |
| | | #976 #1286 #163 #685 #442 |
| 3973_3974delinsAG | 591A > S | #M258 |
| 3978C > T | | #1020 #1024 #1158 #1286 |
| | | #1350 #1570 #1591 #163 |
| | | #1704 #2107 #2112 #217 |
| | | #2320 #2806 #3086 #3142 |
| | | #367 #442 #508 #667 #668 |
| | | #685 #704 #714 #767 #790 |
| | | #976 #985 #M258 |
| 3979G > T | 593A > S | #1017 #1055 #1260 #1273 |
| | | #1343 #1449 #1534 #1919 |
| | | #2087 #2102 #2206 #2208 |
| | | #2497 #3013 #3511 #473 |
| | | #777 |
| 3980C > G | 593A > G | #985 #667 #2806 #M258 |
| | | #217 #767 #1591 #1704 |
| | | #2112 #1350 #668 #367 |
| | | #1020 #1158 #2107 #1570 |
| | | #704 #714 #3086 #790 #976 |
| | | #1286 #163 #685 #442 |
| | | #2320 |
| 3980C > A | 593A > E | #508 #3142 #1024 |
| 3982_3983delinsAC | 594D > T | #985 #667 #2806 #M258 |
| | | #217 #767 #1591 #508 |
| | | #1704 #2112 #1350 #668 |
| | | #367 #1020 #1158 #2107 |
| | | #1570 #704 #714 #3086 |
| | | #1024 #790 #976 #1286 |
| | | #163 #685 #442 #2320 |
| 3982G > A | 594D > N | #3142 |
| 3987C > A | | #163 |
| 3990C > T | | #1020 #1024 #1158 #1286 |
| | | #1350 #1570 #1591 #163 |
| | | #1704 #2107 #2112 #217 |
| | | #2320 #2806 #3086 #3142 |
| | | #367 #442 #508 #667 #668 |
| | | #685 #704 #714 #767 #790 |
| | | #976 #985 #M258 |
| 3991A > G | 597T > A | #1017 #473 #1273 #1260 |
| 3991_3993delinsCAC | 597T > H | #985 #667 #2806 #M258 |
| | | #217 #767 #1591 #508 |
| | | #1704 #2112 #1350 #668 |
| | | #367 #1020 #1158 #2107 |
| | | #1570 #704 #714 #3086 |
| | | #1024 #790 #976 #1286 |
| | | #163 #685 #442 #2320 |
| 3992_3993delinsAC | 597T > N | #3142 |
| 3999C > T | | #1017 #1273 #2087 #1260 |
| 3999C > A | | #985 #667 #2806 #M258 |
| | | #217 #767 #1591 #508 |
| | | #1704 #2112 #1350 #668 |
| | | #367 #1020 #1158 #2107 |
| | | #1570 #704 #714 #3086 |
| | | #3142 #1024 #790 #976 |
| | | #1286 #163 #685 #442 |
| | | #2320 |
| 4000G > A | 600V > I | #2497 #1449 |
| 4001_4002delinsCG | 600V > A | #985 #667 #2806 #M258 |
| | | #217 #767 #1591 #508 |
| | | #1704 #2112 #1350 #668 |
| | | #367 #1020 #1158 #2107 |
| | | #1570 #704 #714 #3086 |
| | | #3142 #1024 #790 #976 |
| | | #1286 #163 #685 #442 |
| | | #2320 |
| 4003_4005delinsTTA | | #985 #667 #2806 #M258 |
| | | #217 #767 #1591 #508 |
| | | #1704 #2112 #1350 #668 |
| | | #367 #1020 #1158 #2107 |
| | | #1570 #704 #714 #3086 |
| | | #3142 #1024 #790 #976 |
| | | #1286 #163 #685 #442 |
| | | #2320 |
| 4006C > T | 602P > S | #777 |
| 4008A > T | | #1020 #1024 #1158 #1286 |
| | | #1350 #1570 #1591 #163 |
| | | #1704 #2107 #2112 #217 |
| | | #2320 #2806 #3013 #3086 |
| | | #3142 #3511 #367 #371 |
| | | #442 #508 #667 #668 #685 |
| | | #704 #714 #767 #790 #976 |
| | | #985 #M258 |
| 4011C > T | | #1020 #1024 #1158 #1286 |
| | | #1350 #1570 #1591 #163 |
| | | #1704 #2107 #2112 #217 |
| | | #2320 #2806 #3086 #3142 |
| | | #367 #442 #508 #667 #668 |
| | | #685 #704 #714 #767 #790 |
| | | #976 #985 #M258 |
| 4017C > G | | #1020 #1024 #1158 #1286 |
| | | #1350 #1570 #1591 #163 |
| | | #1704 #2107 #2112 #217 |
| | | #2320 #2806 #3086 #3142 |
| | | #367 #442 #508 #667 #668 |
| | | #685 #704 #714 #767 #790 |
| | | #976 #985 #M258 |
| 4017C > A | | #2557 |
| 4026C > T | | #1020 #1024 #1158 #1286 |
| | | #1350 #1570 #1591 #163 |
| | | #1704 #2107 #2112 #217 |
| | | #2320 #2806 #3086 #3142 |
| | | #367 #442 #667 #668 #685 |
| | | #704 #714 #767 #790 #976 |
| | | #985 #M258 |
| 4027A > C | | #1020 #1158 #1286 #1350 |
| | | #1570 #1591 #163 #2107 |
| | | #2112 #217 #2320 #2806 |
| | | #3086 #367 #442 #508 #667 |
| | | #668 #685 #704 #714 #767 |
| | | #790 #976 #985 |
| 4032T > C | | #1020 #1024 #1055 #1158 |
| | | #1260 #1273 #1286 #1343 |
| | | #1350 #1449 #1570 #1591 |
| | | #163 #1704 #1919 #2040 |
| | | #2087 #2102 #2107 #2112 |
| | | #2128 #2141 #217 #2206 |
| | | #2208 #2320 #2497 #2557 |
| | | #2806 #3013 #3086 #3142 |
| | | #3511 #367 #371 #3765 |
| | | #387 #442 #471 #473 #508 |
| | | #667 #668 #685 #704 #714 |
| | | #767 #777 #790 #877 #976 |
| | | #985 #M258 |
| 4035G > A | | #1704 |
| 4041T > G | | #1017 #1020 #1024 #1055 |
| | | #1158 #1260 #1273 #1286 |
| | | #1343 #1350 #1449 #1534 |
| | | #1570 #1591 #163 #1919 |
| | | #2087 #2102 #2107 #2112 |
| | | #2128 #2141 #217 #2206 |
| | | #2208 #2320 #2497 #2557 |
| | | #2806 #3013 #3086 #3142 |
| | | #3511 #367 #371 #3765 |
| | | #387 #442 #471 #473 #667 |
| | | #668 #685 #704 #714 #767 |
| | | #777 #790 #877 #976 #985 |
| | | #M258 |
| 4041T > A | | #1704 #508 |
| 4047G > A | | #1020 #1024 #1158 #1286 |
| | | #1343 #1350 #1449 #1570 |
| | | #1591 #163 #2107 #2112 |
| | | #217 #2208 #2320 #2497 |
| | | #2806 #3013 #3086 #3142 |
| | | #3511 #367 #442 #508 #667 |
| | | #668 #685 #704 #714 #767 |
| | | #790 #976 #985 #M258 |
| 4047G > T | | #1704 |
| 4050C > T | | #1534 #2102 #2141 #2557 |
| | | #387 #877 |
| 4053C > T | | #1020 #1024 #1158 #1286 |
| | | #1350 #1449 #1570 #1591 |
| | | #163 #1704 #2107 #2112 |
| | | #217 #2208 #2320 #3142 |
| | | #367 #442 #471 #508 #667 |
| | | #668 #685 #704 #714 #767 |
| | | #790 #976 #985 #M258 |
| 4053C > A | | #2806 #3086 |
| 4059A > C | | #1020 #1024 #1158 #1286 |
| | | #1350 #1570 #1591 #163 |
| | | #1704 #2107 #2112 #217 |
| | | #2208 #2320 #2806 #3086 |
| | | #3142 #367 #442 #508 #667 |
| | | #668 #685 #704 #714 #767 |
| | | #790 #976 #985 #M258 |
| 4062G > A | | #1024 #471 |
| 4068A > T | | #1020 #1024 #1158 #1286 |
| | | #1350 #1570 #1591 #163 |
| | | #1704 #2107 #2112 #217 |
| | | #2208 #2320 #2806 #3086 |
| | | #367 #442 #508 #667 #668 |
| | | #685 #704 #714 #767 #790 |
| | | #976 #985 #M258 |
| 4068A > C | | #1260 #2128 #777 |
| 4074G > C | | #1020 #1024 #1158 #1350 |
| | | #1570 #1591 #163 #1704 |
| | | #2107 #2112 #217 #2208 |
| | | #2320 #2806 #3086 #367 |
| | | #442 #508 #667 #668 #685 |
| | | #704 #714 #767 #790 #976 |
| | | #985 #M258 |
| 4074G > A | | #2206 |
| 4077C > T | | #1020 #1024 #1158 #1350 |
| | | #1570 #1591 #163 #1704 |
| | | #2107 #2112 #2128 #217 |
| | | #2208 #2320 #2806 #3086 |
| | | #367 #3765 #442 #471 #508 |
| | | #667 #668 #685 #704 #714 |
| | | #767 #777 #790 #976 #985 |
| | | #M258 |
| 4083T > C | | #1020 #1024 #1158 #1260 |
| | | #1350 #1570 #1591 #163 |
| | | #1704 #2107 #2112 #2128 |
| | | #217 #2208 #2320 #2497 |
| | | #2806 #3013 #3086 #3142 |
| | | #3511 #367 #3765 #442 |
| | | #471 #508 #667 #668 #685 |
| | | #704 #714 #767 #777 #790 |
| | | #976 #985 #M258 |
| 4089C > T | | #1020 #1024 #1158 #1286 |
| | | #1350 #1570 #1591 #163 |
| | | #1704 #2107 #2112 #217 |
| | | #2208 #2320 #2806 #3086 |
| | | #3142 #367 #442 #508 #667 |
| | | #668 #685 #704 #767 #790 |
| | | #976 #985 #M258 |
| 4092C > T | | #1020 #1024 #1158 #1260 |
| | | #1286 #1343 #1350 #1570 |
| | | #1591 #163 #1704 #2107 |
| | | #2112 #2128 #217 #2208 |
| | | #2320 #2497 #2806 #3013 |
| | | #3086 #3142 #3511 #367 |
| | | #3765 #442 #471 #508 #667 |
| | | #668 #685 #704 #714 #767 |
| | | #777 #790 #976 #985 |
| | | #M258 |
| 4095T > C | | #777 |
| 4098C > A | | #1020 #1158 #1286 #1350 |
| | | #1591 #163 #2112 #217 |
| | | #2320 #367 #442 #668 #685 |
| | | #714 #767 #790 #976 #985 |
| 4098C > G | | #1024 #1570 #1704 #2107 |
| | | #2208 #2806 #3086 #3142 |
| | | #704 #777 #M258 |
| 4098C > T | | #1260 #1343 #2128 #3765 |
| | | #471 |
| 4101C > G | | #1020 #1024 #1158 #1286 |
| | | #1350 #1570 #1591 #163 |
| | | #1704 #2107 #2112 #217 |
| | | #2208 #2320 #2806 #3086 |
| | | #367 #442 #668 #685 #704 |
| | | #714 #767 #790 #976 #985 |
| | | #M258 |
| 4101C > T | | #1260 #1343 #2128 #3142 |
| | | #3765 #471 |
| 4107T > C | | #1017 #1055 #1260 #1273 |
| | | #1534 #1919 #2040 #2087 |
| | | #2141 #2206 #2557 #3013 |
| | | #3511 #371 #387 #508 #877 |
| 4107T > A | | #1020 #1024 #1158 #1286 |
| | | #1343 #1350 #1570 #1591 |
| | | #163 #1704 #2107 #2112 |
| | | #2128 #217 #2208 #2320 |
| | | #2806 #3086 #3142 #367 |
| | | #3765 #442 #471 #668 #685 |
| | | #704 #714 #767 #777 #790 |
| | | #976 #985 #M258 |
| 4110A > T | | #1020 #1024 #1158 #1286 |
| | | #1350 #1570 #1591 #163 |
| | | #1704 #2107 #2112 #217 |
| | | #2208 #2320 #2806 #3086 |
| | | #3142 #367 #442 #668 #685 |
| | | #704 #714 #767 #790 #976 |
| | | #985 #M258 |
| 4113C > T | | #1020 #1024 #1055 #1158 |
| | | #1286 #1343 #1350 #1534 |
| | | #1570 #1591 #163 #1704 |
| | | #2087 #2107 #2112 #2128 |
| | | #2141 #217 #2206 #2208 |
| | | #2320 #2557 #2806 #3013 |
| | | #3086 #3142 #3511 #367 |
| | | #3765 #442 #471 #668 #685 |
| | | #704 #714 #767 #777 #790 |
| | | #877 #976 #985 #M258 |
| 4116A > G | | #1020 #1158 #1286 #1350 |
| | | #1570 #1591 #2107 #2112 |
| | | #217 #367 #668 #685 #767 |
| | | #790 |
| 4117C > T | | #2087 #2206 |
| 4119T > G | | #1017 #1055 #1343 #1919 |
| | | #2087 #3013 #3511 #877 |
| 4119T > C | | #1020 #1024 #1158 #1286 |
| | | #1350 #1570 #1591 #163 |
| | | #1704 #2107 #2112 #217 |
| | | #2208 #2320 #3086 #3142 |
| | | #367 #442 #508 #668 #685 |
| | | #704 #714 #767 #790 #976 |
| | | #985 #M258 |
| 4119T > A | | #2206 |
| 4122A > G | | #1055 #1343 #1919 #2087 |
| | | #2206 #3013 #3511 #877 |
| 4123C > A | 641H > N | #508 |
| 4128T > G | | #1020 #1158 #1286 #1350 |
| | | #1570 #1591 #163 #1704 |
| | | #2107 #2112 #217 #367 |
| | | #668 #685 #714 #790 #985 |
| 4128T > A | | #1024 #2208 #2320 #3086 |
| | | #3142 #442 #508 #704 #767 |
| | | #976 #M258 |
| 4128T > C | | #1343 |
| 4131T > C | | #1260 #1343 #2087 #2128 |
| | | #2141 #2206 #3013 #3511 |
| | | #3765 #471 #473 #777 |
| 4134A > T | | #1020 #1024 #1158 #1286 |
| | | #1350 #1570 #1591 #163 |
| | | #1704 #2107 #2112 #217 |
| | | #2208 #2320 #3086 #3142 |
| | | #367 #442 #508 #668 #685 |
| | | #704 #714 #767 #790 #976 |
| | | #985 #M258 |
| 4134A > G | | #1260 #1343 #2040 #2087 |
| | | #2128 #2141 #2206 #3013 |
| | | #3511 #3765 #387 #471 |
| | | #473 #777 |
| 4137G > A | | #1017 #1273 #2040 #2206 |
| | | #3142 #387 |
| 4140T > C | | #1020 #1024 #1158 #1286 |
| | | #1350 #1570 #1591 #163 |
| | | #1704 #2107 #2112 #217 |
| | | #2208 #2320 #2806 #3086 |
| | | #3142 #367 #442 #508 #667 |
| | | #668 #685 #704 #714 #767 |
| | | #790 #976 #985 #M258 |
| 4141_4143delinsATG | 647L > M | #2208 #985 #667 #2806 |
| | | #M258 #217 #767 #1591 |
| | | #508 #1704 #2112 #1350 |
| | | #668 #367 #1020 #1158 |
| | | #2107 #1570 #704 #714 |
| | | #3086 #3142 #1024 #790 |
| | | #976 #1286 #163 #685 #442 |
| | | #2320 |
| 4146C > T | | #1055 #2206 #442 |
| 4149G > A | | #1020 #1024 #1158 #1286 |
| | | #1350 #1570 #1591 #163 |
| | | #1704 #2102 #2107 #2112 |
| | | #217 #2208 #2320 #2806 |
| | | #3086 #3142 #367 #3765 |
| | | #442 #471 #508 #667 #668 |
| | | #685 #704 #714 #767 #790 |
| | | #976 #985 #M258 |
| 4151A > G | 650N > S | #667 |
| 4152C > T | | #1055 #1343 #2206 #3013 |
| | | #3511 #777 |
| 4153A > T | 651T > S | #667 |
| 4155C > T | | #1020 #1024 #1158 #1286 |
| | | #1350 #1570 #1591 #163 |
| | | #1704 #2107 #2112 #217 |
| | | #2208 #2320 #2806 #3086 |
| | | #3142 #367 #442 #508 #667 |
| | | #668 #685 #704 #714 #767 |
| | | #790 #976 #985 #M258 |
| 4158G > C | | #1020 #1024 #1158 #1286 |
| | | #1350 #1591 #163 #1704 |
| | | #2112 #217 #2208 #2320 |
| | | #2806 #3086 #3142 #367 |
| | | #442 #508 #667 #668 #685 |
| | | #714 #767 #777 #790 #976 |
| | | #985 #M258 |
| 4158G > A | | #1055 #1570 #2107 #704 |
| 4158G > T | | #1273 |
| 4161A > T | | #1010 #1020 #1024 #1158 |
| | | #1286 #1350 #1570 #1591 |
| | | #163 #1704 #2107 #2112 |
| | | #217 #2208 #2320 #2806 |
| | | #3086 #3142 #367 #442 |
| | | #508 #667 #668 #685 #704 |
| | | #714 #767 #790 #976 #985 |
| | | #M258 |
| 4164T > A | | #1010 #1020 #1024 #1158 |
| | | #1286 #1350 #1591 #163 |
| | | #1704 #2107 #2112 #217 |
| | | #2208 #2320 #2806 #3086 |
| | | #3142 #367 #442 #508 #667 |
| | | #668 #685 #704 #714 #767 |
| | | #790 #976 #985 #M258 |
| 4165_4209delins_46nt | 655_669delins_15aa | #1570 |
| 4167G > C | | #1010 #1020 #1024 #1158 |
| | | #1286 #1350 #1591 #163 |
| | | #1704 #2107 #2112 #217 |
| | | #2208 #2320 #2806 #3086 |
| | | #3142 #367 #442 #508 #667 |
| | | #668 #685 #704 #714 #767 |
| | | #790 #976 #985 #M258 |
| 4167G > A | | #1534 #2206 #2557 |
| 4174T > C | 658S > P | #1010 #1020 #1024 #1158 |
| | | #1286 #1350 #1570 #1591 |
| | | #163 #1704 #2107 #2112 |
| | | #217 #2208 #2320 #2806 |
| | | #3086 #3142 #367 #442 |
| | | #508 #667 #668 #685 #704 |
| | | #714 #767 #790 #976 #985 |
| | | #M258 |
| 4176G > T | | #1010 #1020 #1055 #1158 |
| | | #1286 #1343 #1570 #1591 |
| | | #217 #2206 #3013 #3086 |
| | | #3142 #367 #667 #767 #790 |
| | | #877 #976 #M258 |
| 4176G > A | | #1017 #471 #685 |
| 4176G > C | | #1024 #1350 #163 #1704 |
| | | #2107 #2112 #2208 #2320 |
| | | #442 #508 #668 #704 #714 |
| | | #985 |
| 4178C > G | | |
| 4179C > A | | #1010 #1020 #1024 #1158 |
| | | #1286 #1350 #1591 #163 |
| | | #2107 #2112 #217 #2208 |
| | | #2320 #2806 #3086 #3142 |
| | | #367 #442 #508 #667 #668 |
| | | #685 #704 #714 #767 #790 |
| | | #976 #985 #M258 |
| 4179C > G | | #1704 |
| 4181C > A | 660T > N | #1010 #1020 #1024 #1158 |
| | | #1286 #1350 #1591 #163 |
| | | #1704 #2107 #2112 #217 |
| | | #2208 #2320 #2806 #3086 |
| | | #3142 #367 #442 #508 #667 |
| | | #668 #685 #704 #714 #767 |
| | | #790 #976 #985 #M258 |
| 4182C > T | | #2206 #3765 #714 #877 |
| 4185C > T | | #1024 #1570 #2128 #2320 |
| 4188T > C | | #1055 #1260 #1343 #2206 |
| | | #3013 |
| 4189_4191delinsTCT | 663A > S | #2208 #1010 #985 #667 |
| | | #2806 #217 #1591 #508 |
| | | #1704 #2112 #1350 #668 |
| | | #367 #1020 #1158 #2107 |
| | | #704 #714 #3086 #790 #976 |
| | | #1286 #163 #685 #442 |
| | | #2320 |
| 4191G > A | | #2087 #3765 #471 |
| 4192G > T | 664A > S | #1602 #1570 |
| 4194A > C | | #1010 #1020 #1158 #1286 |
| | | #1350 #1591 #1602 #163 |
| | | #1704 #2107 #2112 #217 |
| | | #2208 #2320 #2806 #3086 |
| | | #367 #442 #508 #667 #668 |
| | | #685 #704 #714 #790 #976 |
| | | #985 |
| 4197G > A | | #767 #877 #M258 |
| 4206C > T | | #1010 #1020 #1024 #1158 |
| | | #1286 #1350 #1534 #1591 |
| | | #1602 #163 #1704 #2107 |
| | | #2112 #217 #2206 #2320 |
| | | #2557 #2806 #3086 #3142 |
| | | #367 #442 #508 #667 #668 |
| | | #685 #704 #714 #790 #877 |
| | | #976 #985 |
| 4209C > T | | #2141 #473 #767 #985 |
| | | #M258 |
| 4212C > T | | #1273 #2208 #371 #3765 |
| | | #471 |
| 4221C > T | | #1024 #1055 #1158 #1260 |
| | | #1286 #129 #1350 #1570 |
| | | #1591 #1602 #163 #1704 |
| | | #1919 #2040 #2087 #2107 |
| | | #2112 #2128 #2208 #2320 |
| | | #2806 #3086 #3765 #387 |
| | | #442 #508 #668 #685 #767 |
| | | #777 #976 #985 #M258 |
| 4230A > G | | #1010 #1017 #1020 #1024 |
| | | #1055 #1158 #1260 #1273 |
| | | #1286 #1343 #1350 #1449 |
| | | #1534 #1570 #1602 #163 |
| | | #1704 #1919 #2087 #2107 |
| | | #2112 #2128 #2141 #217 |
| | | #2206 #2208 #2320 #2557 |
| | | #2806 #3013 #3142 #3511 |
| | | #367 #371 #3765 #387 #442 |
| | | #471 #473 #508 #667 #668 |
| | | #704 #714 #767 #777 #790 |
| | | #877 #976 #985 |
| 4233G > A | | #1024 #1570 #2107 #2320 |
| 4239C > T | | #2128 #2557 |
| 4239C > A | 679S > R | #2806 |
| 4242G > A | | #1260 |
| 4245G > A | | #1260 #714 #767 |
| 4248C > T | | #2557 #685 |
| 4248C > A | | #3511 |
| 4251G > A | | #1055 #371 |
| 4258C > T | | #2040 #387 |
| 4260G > A | | #1286 #1534 |
| 4263G > A | | #1055 |
| 4266G > A | | #1273 #1343 #1449 #3142 |
| | | #371 #668 #777 |
| 4269A > G | | #1020 #1024 #1055 #1158 |
| | | #1260 #1273 #1286 #129 |
| | | #1343 #1350 #1449 #1534 |
| | | #1570 #1591 #1602 #163 |
| | | #1704 #1919 #2040 #2087 |
| | | #2107 #2112 #2128 #2141 |
| | | #217 #2206 #2208 #2320 |
| | | #2557 #3013 #3086 #3142 |
| | | #3511 #367 #371 #3765 |
| | | #387 #442 #471 #473 #508 |
| | | #667 #668 #685 #704 #714 |
| | | #767 #777 #790 #877 #976 |
| | | #985 #M258 |
| 4278A > G | | #2128 #2208 |
| 4287T > C | | #1024 #129 #1343 #1449 |
| | | #1570 #2087 #2102 #2107 |
| | | #2128 #2208 #2320 #3013 |
| | | #3086 #3142 #3511 #3765 |
| | | #387 #442 #668 #704 #777 |
| | | #790 #M258 |
| 4290C > T | | #2208 #387 |
| 4293A > G | | #1010 #1020 #1024 #1260 |
| | | #1273 #129 #1343 #1449 |
| | | #1534 #1570 #1602 #163 |
| | | #1704 #1919 #2040 #2087 |
| | | #2102 #2107 #2112 #2128 |
| | | #2141 #2206 #2208 #2320 |
| | | #2557 #2806 #3013 #3086 |
| | | #3142 #3511 #367 #371 |
| | | #3765 #387 #442 #471 #473 |
| | | #508 #667 #668 #685 #704 |
| | | #767 #777 #790 #877 #976 |
| | | #985 #M258 |
| 4296T > C | | #1024 #1260 #129 #1343 |
| | | #1449 #1570 #1704 #1919 |
| | | #2040 #2087 #2102 #2107 |
| | | #2112 #2128 #2208 #2320 |
| | | #2497 #2557 #2806 #3013 |
| | | #3086 #3142 #3511 #3765 |
| | | #387 #442 #508 #668 #704 |
| | | #767 #777 #M258 |
| 4299G > A | | #2128 #2206 #471 |
| 4302C > T | | #1158 #1286 #3511 #714 |
| 4308C > A | | #1055 #367 #667 #877 |
| 4308C > T | | #3086 |
| 4311C > T | | #1449 #3142 |
| 4314C > T | | #1260 #1919 #2087 #2208 |
| | | #668 |
| 4320G > A | | #1010 #1017 #1020 #1024 |
| | | #1055 #1158 #1260 #1273 |
| | | #1286 #129 #1449 #1534 |
| | | #1570 #1591 #1602 #163 |
| | | #2040 #2102 #2107 #2128 |
| | | #217 #2206 #2208 #3013 |
| | | #3086 #3142 #3511 #371 |
| | | #3765 #442 #471 #473 #685 |
| | | #714 #790 #976 |
| 4331T > C | 710V > A | #2557 |
| 4336T > C | 712F > L | #2557 |
| 4344G > A | | #1273 |
| 4356C > T | | #1010 #1020 #1024 #1055 |
| | | #1158 #1260 #1273 #1286 |
| | | #129 #1343 #1449 #1534 |
| | | #1570 #1591 #1602 #163 |
| | | #1919 #2102 #2107 #2112 |
| | | #2141 #217 #2206 #2208 |
| | | #2497 #2557 #2806 #3086 |
| | | #3511 #371 #3765 #387 |
| | | #442 #471 #508 #667 #668 |
| | | #685 #704 #714 #777 #790 |
| | | #976 #M258 |
| 4369C > G | 723P > A | #129 |
| 4400G > T | 733R > L | #2102 |
| 4401T > C | | #163 |

[0029] An object of the present invention relates to a variant VP1 capsid protein that consists of the amino acid sequence as set forth in SEQ ID NO:2 comprising at least one mutation selected from the group consisting of V151A, Q164N; T200S; N201T; M211V; T233Q; M235L; T410Q; S446N; R447K; N449Q; T450S; P451N; T455L; T456Q; Q461L; A467P; S468T; D469S; I470M; R471S; D472L; S474A; R475K; V488L; T491Q; S492A; A493N; E499N; Y500F; S501P; G504A; Q536M; S537H; V539T; S547T; E548N; K549A; T550N; N551D; V552A; I554L; E555D; K556N; S578Y; T581N; R585N; R585S; G586S; R588T; Q589G; A590P; A591T; A593S; A593G; D594T; T597H; V600A; L647M; S658P; T660N; and A663S.

[0030] In some embodiments, the variant VP1 capsid protein of the present invention has an amino acid sequence selected from the group consisting of SEQ ID NO: 3 to SEQ ID NO:61.

[0031] A further object of the present invention relates to a variant VP1 capsid protein of the present invention has an amino acid sequence selected from the group consisting of SEQ ID NO:26 (i.e. capsid #3013), SEQ ID NO:9 (i.e. capsid #2087), SEQ ID NO: 20 (i.e. capsid #1449), SEQ ID NO: 10 (i.e. capsid #2206), SEQ ID NO: 12 (i.e. capsid #1534), SEQ ID NO: 56 (i.e. capsid #163), SEQ ID NO: 23 (i.e. capsid #1343), SEQ ID NO: 53 (i.e. capsid #790), SEQ ID NO: 6 (i.e. capsid #1017), SEQ ID NO: 11 (i.e. capsid #877), SEQ ID NO:8 (i.e. capsid #1273), SEQ ID NO: 3 (i.e. capsid #2497), SEQ ID NO: 60 (i.e. capsid #1055), SEQ ID NO:14 (i.e. capsid #1919), SEQ ID NO: 4, SEQ ID NO:5, SEQ ID NO:7, SEQ ID NO:13, SEQ ID NO:15 to SEQ ID NO:19, SEQ ID NO:21, SEQ ID NO:22, SEQ ID NO:24, SEQ ID NO:25, SEQ ID NO:27 to SEQ ID NO:55, SEQ ID NO:57 to SEQ ID NO:59, SEQ ID NO:61.

SEQ ID NO: 3
>#2497_AAV.FL.linear_-_major_coat_protein_VP1_translation
CHC2497N_Adeno-Associated virus isolates in liver tumor, linear form
MAADGYLPDWLEDTLSEGIRQWWKLKPGPPPPKPAERHKDDSRGLVLPGYKYLGPFNGLDKGEPVNEADAAALEHDKAYD
RQLDSGDNPYLKYNHADAEFQERLKEDTSFGGNLGRAVFQAKKRVLEPLGLVEEPVKTAPGKKRPVEHSPVEPDSSSGTG
KAGQQPARKRLNFGQTGDADSVPDPQPLGQPPAAPSGLGTNTMATGSGAPMADNNEGADGVGNSSGNWHCDSTWMGDRVI
TTSTRTWALPTYNNHLYKQISSQSGASNDNHYFGYSTPWGYFDFNRFHCHFSPRDWQRLINNNWGFRPKRLNFKLFNIQV
KEVTQNDGTTTIANNLTSTVQVFTDSEYQLPYVLGSAHQGCLPPFPADVFMVPQYGYLTLNNGSQAVGRSSFYCLEYFPS
QMLRTGNNFQFSYTFEDVPFHSSYAHSQSLDRLMNPLIDQYLYYLSRTNTPSGTTTQSRLQFSQAGASDIRDQSRNWLPG
PCYRQQRVSKTAADNSNSEYSWTGATKYHLNGRDSLVNPGPAMASHKDDEEKFFPHSGVLIFGKQGSEKTNVDIEKVMIT
DEEEIRTTNPVATEQYGTVSTNLQSGNTQAATSDVNTQGILPGMVWQDRDVYLQGPIWAKIPHTDGHFHPSPLMGGFGLK
HPPPQILIKNTPVPANPSTTFSAAKFASFITQYSTGQVSVEIEWELQKENSKRWNPEIQYTSNYNKSVNVDFTVDTNGVY
SEPRPIGTRYLTRNL*
SEQ ID NO: 4
>#2102_AAV.FL.linear_-_major_coat_protein_VP1_translation
CHC2102N_Adeno-Associated virus isolates in liver tumor, linear form
MAADGYLPDWLEDTLSEGIRQWWKLKPGPPPPKPAERHQDDSRGLVLPGYKYLGPFNGLDKGEPVNEADAAALEHDKAYD
RQLESGDNPYLKYNHADAEFQERLKEDTSFGGNLGRAVFQAKKRVLEPLGLVEEPVKTAPGKKRPVEHSPVEPDSSSGTG
KAGNQPARKRLNFGQTGDADSVPDPQPLGQPPAAPSGLGTNTMATGSGAPMADNNEGADGVGNSSGNWHCDSTWLGDRVI
TTSTRTWALPTYNNHLYKQISSQSGASNDNHYFGYSTPWGYFDFNRFHCHFSPRDWQRLINNNWGFRPKRLNFKLFNIQV
KEVTQNDGTTTIANNLTSTVQVFTDSEYQLPYVLGSAHQGCLPPFPADVFMVPQYGYLTLNNGSQAVGRSSFYCLEYFPS
QMLRTGNNFTFSYTFEDVPFHSSYAHSQSLDRLMNPLIDQYLYYLSGTNTPSGTTTQSRLQFSQAGASDIRDQSRNWLPG
PCYRQQRVSKTAADNSNSEYSWTGATKYHLNGRDSLVNPGPAMASHKDDEEKFFPQSGVLIFGKQGSEKTNVDIEKVMIT
DEEEIRTTNPVATEQYGSVSTNLQSGNTQAATSDVNTQGVLPGMVWQDRDVYLQGPIWAKIPHTDGHFHPSPLMGGFGLK
HPPPQILIKNTPVPANPSTTFSAAKFASFITQYSTGQVSVEIEWELQKENSKRWNPEIQYTSNYNKSVNVDFTVDTNGVY
SEPRPIGTRYLTLNL*
SEQ ID NO: 5
>#371_AAV.FL.linear_-_major_coat_protein_VP1_translation
CHC371N_Adeno-Associated virus isolates in liver tumor, linear form
MAADGYLPDWLEDTLSEGIRQWWKLKPGPPPPKPAERHKDDSRGLVLPGYKYLGPFNGLDKGEPVNEADAAALEHDKAYD
RQLDSGDNPYLKYNHADAEFQERLKEDTSFGGNLGRAVFQAKKRVLEPLGLVEEPVKTAPGKKRPVEHSPVEPDSSSGTG
KAGQQPARKRLNFGQTGDADSVPDPQPLGQPPAAPSGLGTNTMATGSGAPMADNNEGADGVGNSSGNWHCDSTWMGDRVI
TTSTRTWALPTYNNHLYKQISSQSGASNDNHYFGYSTPWGYFDFNRFHCHFSPRDWQRLINNNWGFRPKRLNFKLFNIQV
KEVTQNDGTTTIANNLTSTVQVFTDSEYQLPYVLGSAHQGCLPPFPADVFMVPQYGYLTLNNGSQAVGRSSFYCLEYFPS
QMLRTGNNFTFSYTFEDVPFHSSYAHSQSLDRLMNPLIDQYLYYLSRTNTPSGTTTQSRLQFSQAGASDIRDQSRNWLPG
PCYRQQRVSKTSADNNNSEYSWTGATKYHLNGRDSLVNPGPAMASHKDDEEKFFPQSGVLIFGKQGSEKTNVDIEKVMIT
DEEEIRTTNPVATEQYGSVSTNLQSGNTQAATADVNTQGVLPGMVWQDRDVYLQGPIWAKIPHTDGHFHPSPLMGGFGLK
HPPPQILIKNTPVPANPSTTFSAAKFASFITQYSTGQVSVEIEWELQKENSKRWNPEIQYTSNYNKSVNVDFTVDTNGVY
SEPRPIGTRYLTRNL*
SEQ ID NO: 6
>#1017_AAV.FL.linear_-_major_coat_protein_VP1_translation
CHC1017N_Adeno-Associated virus isolates in liver tumor, linear form
MAADGYLPDWLEDTLSEGIRQWWKLKPGPPPPKPAERHKDDSRGLVLPGYKYLGPFNGLDKGEPVNEADAAALEHDKAYD
RQLDSGDNPYLKYNHADAEFQERLKEDTSFGGNLGRAVFQAKKRVLEPLGLVEEPVKTAPGKKRPVEHSPVEPDSSSGTG
KAGQQPARKRLNFGQTGDADSVPDPQPLGQPPAAPSGLGTNTMASGSGAPMADNNEGADGVGNSSGNWHCDSTWMGDRVI
TTSTRTWALPTYNNHLYKQISSQSGASNDNHYFGYSTPWGYFDFNRFHCHFSPRDWQRLINNNWGFRPKRLNFKLFNIQV
KEVTQNDGTTTIANNLTSTVQVFTDSEYQLPYVLGSAHQGCLPPFPADVFMVPQYGYLTLNNGSQAVGRSSFYCLEYFPS
QMLRTGNNFTFSYTFEDVPFHSSYAHSQSLDRLMNPLIDQYLYYLSRTNTPSGTTTQSRLQFSQAGASDIRDQSRNWLPG
PCYRQQRVSKTSADNNNSEYSWTGATKYHLNGRDSLVNPGPAMASHKDDEEKFFPQSGVLIFGKQDSGKTNVDIEKVMIT
DEEEIRTTNPVATEQYGAVSTNLQSGNTQAATSDVNAQGVLPGMVWQDRDVYLQGPIWAKIPHTDGHFHPSPLMGGFGLK
HPPPQILIKNTPVPANPSTTFSAAKFASFITQYSTGQVSVEIEWELQKENSKRWNPEIQYTSNYNKSVNVDFTVDTNGVY
SEPRPIGTRYLTRNL*
SEQ ID NO: 7
>#473_AAV.FL.linear_-_major_coat_protein_VP1_translation
CHC473N_Adeno-Associated virus isolates in liver tumor, linear form
MAADGYLPDWLEDTLSEGIRQWWKLKPGPPPPKPAERHKDDSRGLVLPGYKYLGPFNGLDKGEPVNEADAAALEHDKAYD
RQLDSGDNPYLKYNHADAEFQERLKEDTSFGGNLGRAVFQAKKRVLEPLGLVEEPVKTAPGKKRPVEHSPAEPDSSSGTG
KAGQQPARKRLNFGQTGDADSVPDPQPLGQPPAAPSGLGTNTMATGSGAPMADNNEGADGVGNSSGNWHCDSTWMGDRVI
TTSTRTWALPTYNNHLYKQISSQSGASNDNHYFGYSTPWGYFDFNRFHCHFSPRDWQRLINNNWGFRPKRLNFKLFNIQV
KEVTQNDGTTTIANNLTSTVQVFTDSEYQLPYVLGSAHQGCLPPFPADVFMVPQYGYLTLNNGSQAVGRSSFYCLEYFPS
QMLRTGNNFTFSYTFEDVPFHSSYAHSQSLDRLMNPLIDQYLYYLSRTNTPSGTTTQSRLQFSQAGASDIRDQSRNWLPG
PCYRQQRVSKTAADNNNSEYSWTGATKYHLNGRDSLVNPGPAMASHKDDEEKFFPQSGVLIFGKQDSGKTNVDIEKVMIT
DEEEIRTTNPVATEQYGAVSTNLQSGNTQAATSDVNAQGVLPGMVWQDRDVYLQGPIWAKIPHTDGHFHPSPLMGGFGLK
HPPPQILIKNTPVPANPSTTFSAAKFASFITQYSTGQVSVEIEWELQKENSKRWNPEIQYTSNYNKSVNVDFTVDTNGVY
SEPRPIGTRYLTRNL*
SEQ ID NO: 8
>#1273_AAV.FL.linear_-_major_coat_protein_VP1_translation
CHC1273N_Adeno-Associated virus isolates in liver tumor, linear form
MAADGYLPDWLEDTLSEGIRQWWKLKPGPPPPKPAERHQDDSRGLVLPGYKYLGPFNGLDKGEPVNEADAAALEHDKAYD
RQLDSGDNPYLKYNHADAEFQDRLKEDTSFGGNLGRAVFQAKKRVLEPLGLVEEPVKTAPGKKRPVEHSPVEPDSSSGTG
KAGQQPARKRLQTGDADSVPDPQPLGQPPAAPSGLGTNTMATGSGAPMADNNEGADGVGNSSGNWHCDSTWMGDRVITTS
TRTWALPTYNNHLYKQISSQSGASNDNHYFGYSTPWGYFDFNRFHCHFSPRDWQRLINNNWGFRPKRLNFKLFNIQVKEV
TQNDGTTTIANNLTSTVQVFTDSEYQLPYVLGSAHQGCLPPFPADVFMVPQYGYLTLNNGSQAVGRSSFYCLEYFPSQML
RTGNNFTFSYTFEDVPFHSSYAHSQSLDRLMNPLIDQYLYYLSRTNTPSGTTTQSRLQFSQAGASDIRDQSRNWLPGPCY
RQQRVSKTAADNNNSEYSWTGATKYHLNGRDSLVNPGPAMASHKDDEEKFFPQSGVLIFGKQDSGKTNVDIEKVMITDEE
EIRTTNPVATEQYGAVSTNLQSGNTQAATSDVNAQGVLPGMVWQDRDVYLQGPIWAKIPHTDGHFHPSPLMGGFGLKHPP
PQILIKNTPVPANPSTTFSAAKFASFITQYSTGQVSVEIEWELQKENSKRWNPEIQYTSNYNKSVNVDFTVDTNGVYSEP
RPIGTRYLTRNL*
SEQ ID NO: 9
>#2087_AAV.FL.linear_-_major_coat_protein_VP1_translation
CHC2087N_Adeno-Associated virus isolates in liver tumor, linear form
MAADGYLPDWLEDTLSEGIRQWWKLKPGPPPPKPAERHKDDSRGLVLPGYKYLGPFNGLDKGEPVNEADAAALEHDKAYD
RQLDSGDNPYLKYNHADAEFQERLKEDTSFGGNLGRAVFQAKKRVLEPLGLVEEPVKTAPGKKRPVEHSPVEPDSSSGTG
KAGNQPARKRLNFGQTGDADSVPDPQPLGQPPAAPSGLGTNTMASGSGAPMADNNEGADGVGNSSGNWHCDSTWMGDRVI
TTSTRTWALPTYNNHLYKQISSQSGASNDNHYFGYSTPWGYFDFNRFHCHFSPRDWQRLINNNWGFRPKRLNFKLFNIQV
KEVTQNDGTTTIANNLTSTVQVFTDSEYQLPYVLGSAHQGCLPPFPADVFMVPQYGYLTLNNGSQAVGRSSFYCLEYFPS
QMLRTGNNFTFSYTFEDVPFHSSYAHSQSLDRLMNPLIDQYLYYLSRTNTPSGTTTQSRLQFSQAGASDIRDQSRNWLPG
PCYRQQRVSKTAADNNNSEYSWTGATKYHLNGRDSLVNPGPAMASHKDDEEKFFPQSGVLIFGKQGSEKTNVDIEKVMIT
DEEEIRTTNPVATEQYGAVSTNLQSGNTQAATSDVNTQGVLPGMVWQDRDVYLQGPIWAKIPHTDGHFHPSPLMGGFGLK
HPPPQILIKNTPVPANPSTTFSAAKFASFITQYSTGQVSVEIEWELQKENSKRWNPEIQYTSNYNKSVNVDFTVDTNGVY
SEPRPIGTRYLTRNL*
SEQ ID NO: 10
>#2206_AAV.FL.linear_-_major_coat_protein_VP1_translation
CHC2206N_Adeno-Associated virus isolates in liver tumor, linear form
MAADGYLPDWLEDTLSEGIRQWWKLKPGPPPPKPAERHKDDSRGLVLPGYKYLGPFNGLDKGEPVNEADAAALEHDKAYD
RQLDSGDNPYLKYNHADAEFQERLKEDTSFGGNLGRAVFQAKKRVLEPLGLVEEPVKTAPGKKRPVEHSPAEPDSSSGTG
KAGNQPARKRLNFGQTGDADSVPDPQPLGQPPAAPSGLGTNTMASGSGAPMADNNEGADGVGNSSGNWHCDSTWMGDRVI
TTSTRTWALPTYNNHLYKQISSQSGASNDNHYFGYSTPWGYFDFNRFHCHFSPRDWQRLINNNWGFRPKRLNFKLFNIQV
KEVTQNDGTTTIANNLTSTVQVFTDSEYQLPYVLGSAHQGCLPPFPADVFMVPQYGYLTLNNGSQAVGRSSFYCLEYFPS
QMLRTGNNFTFSYTFEDVPFHSSYAHSQSLDRLMNPLIDQYLYYLSRTNTPSGTTTQSRLQFSQAGASDIRDQSRNWLPG
PCYRQQRVSKTSADNNNSEYSWTGATKYHLNGRDSLVNPGPAMASHKDDEEKFFPQSGVLIFGKQGSEKTNVDIEKVMIT
DEEEIRTTNPVATEQYGAVSTNLQSGNTQAATSDVNTQGVLPGMVWQDRDVYLQGPIWAKIPHTDGHFHPSPLMGGFGLK
HPPPQILIKNTPVPANPSTTFSAAKFASFITQYSTGQVSVEIEWELQKENSKRWNPEIQYTSNYNKSVNVDFTVDTNGVY
SEPRPIGTRYLTRNL*
SEQ ID NO: 11
>#877_AAV.FL.linear_-_major_coat_protein_VP1_translation
CHC877N_Adeno-Associated virus isolates in liver tumor, linear form
MAADGYLPDWLEDTLSEGIRQWWKLKPGPPPPKPAERHKDDSRGLVLPGYKYLGPFNGLDKGEPVNEADAAALEHDKAYD
RQLDSGDNPYLKYNHADAEFQERLKEDTSFGGNLGRAVFQAKKRVLEPLGLVEEPVKTAPGKKRPVEHSPAEPDSSSGTG
KAGNQPARKRLNFGQTGDADSVPDPQPLGQPPAAPSGLGTNTMATGSGAPMADNNEGADGVGNSSGNWHCDSTWMGDRVI
TTSTRTWALPTYNNHLYKQISSQSGASNDNHYFGYSTPWGYFDFNRFHCHFSPRDWQRLINNNWGFRPKRLNFKLFNIQV
KEVTQNDGTTTIANNLTSTVQVFTDSEYQLPYVLGSAHQGCLPPFPADVFMVPQYGYLTLNNGSQAVGRSSFYCLEYFPS
QMLRTGNNFTFSYTFEDVPFHSSYAHSQSLDRLMNPLIDQYLYYLSRTNTPSGTTTQSRLQFSQAGASDIRDQSRNWLPG
PCYRQQRVSKTAADNNNSEYSWTGATKYHLNGRDSLVNPGPAMASHKDDEEKFFPQSGVLIFGKQGSEKTNVDIEKVMIT
DEEEIRTTNPVATEQYGSVSTNLQSGNTQAATADVNTQGVLPGMVWQDRDVYLQGPIWAKIPHTDGHFHPSPLMGGFGLK
HPPPQILIKNTPVPANPSTTFSAAKFASFITQYSTGQVSVEIEWELQKENSKRWNPEIQYTSNYNKSVNVDFTVDTNGVY
SEPRPIGTRYLTRNL*
SEQ ID NO: 12
>#1534_AAV.FL.linear_-_major_coat_protein_VP1_translation
CHC1534N_Adeno-Associated virus isolates in liver tumor, linear form
MAADGYLPDWLEDTLSEGIRQWWKLKPGPPPPKPAERHQDDSRGLVLPGYKYLGPFNGLDKGEPVNEADAAALEHDKAYD
RQLDSGDNPYLKYNHADAEFQERLKEDTSFGGNLGRAVFQAKKRVLEPLGLVEEPVKTAPGKKRPVEHSPAEPDSSSGTG
KAGNQPARKRLNFGQTGDADSVPDPQPLGQPPAAPSGLGTNTMATGSGAPMADNNEGADGVGNSSGNWHCDSTWMGDRVI
TTSTRTWALPTYNNHLYKQISSQSGASNDNHYFGYSTPWGYFDFNRFHCHFSPRDWQRLINNNWGFRPKRLNFKLFNIQV
KEVTQNDGTTTIANNLTSTVQVFTDSEYQLPYVLGSAHQGCLPPFPADVFMVPQYGYLTLNNGSQAVGRSSFYCLEYFPS
QMLRTGNNFTFSYTFEDVPFHSSYAHSQSLDRLMNPLIDQYLYYLSRTNTPSGTTTQSRLQFSQAGASDIRDQSRNWLPG
PCYRQQRVSKTAADNNNSEYSWTGATKYHLNGRDSLVNPGPAMASHKDDEEKFFPQSGVLIFGKQGSEKTNVDIEKVMIT
DEEEIRTTNPVATEQYGSVSTNLQSGNTQAATSDVNTQGVLPGMVWQDRDVYLQGPIWAKIPHTDGHFHPSPLMGGFGLK
HPPPQILIKNTPVPANPSTTFSAAKFASFITQYSTGQVSVEIEWELQKENSKRWNPEIQYTSNYNKSVNVDFTVDTNGVY
SEPRPIGTRYLTRNL*
SEQ ID NO: 13
>#2557_AAV.FL.linear_-_major_coat_protein_VP1_translation
CHC2557N_Adeno-Associated virus isolates in liver tumor, linear form
MAADGYLPDWLEDTLSEGIRQWWKLKPGPPPPKPAERHKDDSRGLVLPGYKYLGPFNGLDKGEPVNEADAAALEHDKAYD
RQLDSGDNPYLKYNHADAEFQERLKEDTSFGGNLGRAVFQAKKRVLEPLGLVEEPVKTAPGKKRPVEHSPAEPDSSSGTG
KAGNQPARKRLNFGQTGDADSVPDPQPLGQPPAAPSGLGTNTMATGSGAPMADNNEGADGVGNSSGNWHCDSTWMGDRVI
TTSTRTWALPTYNNHLYKQISSQSGASNDNHYFGYSTPWGYFDFNRFHCHFSPRDWQRLINNNWGFRPKRLNFKLFNIQV
KEVTQNDGTTTIANNLTSTVQVFTDSEYQLPYVLGSAHQGCLPPFPADVFMVPQYGYLTLNNGSQAVGRSSFYCLEYFPS
QMLRTGNNFTFSYTFEDVPFHSSYAHSQSLDRLMNPLIDQYLYYLSRTNTPSGTTTQSRLQFSQAGASDIRDQSRNWLPG
PCYRQQRVSKTAADNNNSEYSWTGATKYHLNGRDSLVNPGPAMASHKDDEEKFFPQSGVLIFGKQGSEKTNVDIEKVMIT
DEEEIRTTNPVATEQYGSVSTNLQSGNTQAATADVNTQGVLPGMVWQDRDVYLQGPIWAKIPHTDGHFHPSPLMGGFGLK
HPPPQILIKNTPVPANPSTTFSAAKFASFITQYSTGQVSVEIEWELQKENSKRWNPEIQYTSNYNKSVNADLTVDTNGVY
SEPRPIGTRYLTRNL*
SEQ ID NO: 14
>#1919_AAV.FL.linear_-_major_coat_protein_VP1_translation
CHC1919N_Adeno-Associated virus isolates in liver tumor, linear form
MAADGYLPDWLEDTLSEGIRQWWKLKPGPPPPKPAERHKDDSRGLVLPGYKYLGPFNGLDKGEPVNEADAAALEHDKAYD
RQLDSGDNPYLKYNHADAEFQERLKEDTSFGGNLGRAVFQAKKRVLEPLGLVEEPVKTAPGKKRPVEHSPVEPDSSSGTG
KAGNQPARKRLNFGQTGDADSVPDPQPLGQPPAAPSGLGTNTMATGSGAPMADNNEGADGVGNSSGNWHCDSTWMGDRVI
TTSTRTWALPTYNNHLYKQISSQSGASNDNHYFGYSTPWGYFDFNRFHCHFSPRDWQRLINNNWGFRPKRLNFKLFNIQV
KEVTQNDGTTTIANNLTSTVQVFTDSEYQLPYVLGSAHQGCLPPFPADVFMVPQYGYLTLNNGSQAVGRSSFYCLEYFPS
QMLRTGNNFTFSYTFEDVPFHSSYAHSQSLDRLMNPLIDQYLYYLSRTNTPSGTTTQSRLQFSQAGASDIRDQSRNWLPG
PCYRQQRVSKTAADNNNSEYSWTGATKYHLNGRDSLVNPGPAMASHKDDEEKFFPQSGVLIFGKQGSEKTNVDIEKVMIT
DEEEIRTTNPVATEQYGAVSTNLQSGNTQAATSDVNTQGVLPGMVWQDRDVYLQGPIWAKIPHTDGHFHPSPLMGGFGLK
HPPPQILIKNTPVPANPSTTFSAAKFASFITQYSTGQVSVEIEWELQKENSKRWNPEIQYTSNYNKSVNVDFTVDTNGVY
SEPRPIGTRYLTRNL*
SEQ ID NO: 15
>#1260_AAV.FL.linear_-_major_coat_protein_VP1_translation
CHC1260N_Adeno-Associated virus isolates in liver tumor, linear form
MAADGYLPDWLEDTLSEGIRQWWKLKPGPPPPKPAERHKDDGRGLVLPGYKYLGPFNGLDKGEPVNEADAAALEHDKAYD
RQLDSGDNPYLKYNHADAEFQERLKEDTSFGGNLGRAVFQAKKRVLEPLGLVEEPVKTAPGKKRPVEHSPAEPDSSSGTG
KAGQQPARKRLNFGQTGDADSVPDPQPLGQPPAAPSGLGTNTMATGSGAPMADNNEGADGVGNSSGNWHCDSTWMGDRVI
TTSTRTWALPTYNNHLYKQISSQSGASNDNHYFGYSTPWGYFDFNRFHCHFSPRDWQRLINNNWGFRPKRLNFKLFNIQV
KEVTQNDGTTTIANNLTSTVQVFTDSEYQLPYVLGSAHQGCLPPFPADVFMVPQYGYLTLNNGSQAVGRSSFYCLEYFPS
QMLRTGNNFTFSYTFEDVPFHSSYAHSQSLDRLMNPLIDQYLYYLSRTNTPSGTTTQSRLQFSQAGASDIRDQSRNWLPG
PCYRQQRVSKTSADNNNSEYSWTGATKYHLNGRDSLVNPGPAMASHKDDEEKFFPQSGVLIFGKQGSEKTNVDIEKVMIT
DEEEIRTTNPVATEQYGAVSTNLQSGNTQAATSDVNAQGVLPGMVWQDRDVYLQGPIWAKIPHTDGHFHPSPLMGGFGLK
HPPPQILIKNTPVPANPSTTFSAAKFASFITQYSTGQVSVEIEWELQKENSKRWNPEIQYTSNYNKSVNVDFTVDTNGVY
SEPRPIGTRYLTRNL*
SEQ ID NO: 16
>#3765_AAV.FL.linear_-_major_coat_protein_VP1_translation
CHC3765N_Adeno-Associated virus isolates in liver tumor, linear form
MAADGYLPDWLEDTLSEGIRQWWKLKPGPPPPKPAERHKDDSRGLVLPGYKYLGPFNGLDKGEPVNEADAAALEHDKAYD
RQLDSGDNPYLKYNHADAEFQERLKEDTSFGGNLGRAVFQAKKRVLEPLGLVEEPVKTAPGKKRPVEHSPAEPDSSSGTG
KAGNQPARKRLNFGQTGDADSVPDPQPLGQPPAAPSGLGTNTMATGSGAPMADNNEGADGVGNSSGNWHCDSTWMGDRVI
TTSTRTWALPTYNNHLYKQISSQSGASNDNHYFGYSTPWGYFDFNRFHCHFSPRDWQRLINNNWGFRPKRLNFKLFNIQV
KEVTQNDGTTTIANNLTSTVQVFTDSEYQLPYVLGSAHQGCLPPFPADVFMVPQYGYLTLNNGSQAVGRSSFYCLEYFPS
QMLRTGNNFTFSYTFEDVPFHSSYAHSQSLDRLMNPLIDQYLYYLSRTNTPSGTTTQSRLQFSQAGASDIRDQSRNWLPG
PCYRQQRVSKTPADNNNSEYSWTGATKYHLNGRDSLVNPGPAMASHKDDEEKFFPQSGVLIFGKQGSEKTNVDIEKVMIT
DEEEIRTTNPVATEQYGSVSTNLQSGNTQAATADVNTQGVLPGMVWQDRDVYLQGPIWAKIPHTDGHFHPSPLMGGFGLK
HPPPQILIKNTPVPANPSTTFSAAKFASFITQYSTGQVSVEIEWELQKENSKRWNPEIQYTSNYNKSVNVDFTVDTNGVY
SEPRPIGTRYLTRNL*
SEQ ID NO: 17
>#471_AAV.FL.linear_-_major_coat_protein_VP1_translation
CHC471N_Adeno-Associated virus isolates in liver tumor, linear form
MAADGYLPDWLEDTLSEGIRQWWKLKPGPPPPKPAERHKDDSRGLVLPGYKYLGPFNGLDKGEPVNEADAAALEHDKAYD
RQLDSGDNPYLKYNHADAEFQERLKEDTSFGGNLGRAVFQAKKRVLEPLGLVEEPVKTAPGKKRPVEHSPAEPDSSSGTG
KAGNQPARKRLNFGQTGDADSVPDPQPLGQPPAAPSGLGTNTMATGSGAPMADNNEGADGVGNSSGNWHCDSTWMGDRVI
TTSTRTWALPTYNNHLYKQISSQSGASNDNHYFGYSTPWGYFDFNRFHCHFSPRDWQRLINNNWGFRPKRLNFKLFNIQV
KEVTQNDGTTTIANNLTSTVQVFTDSEYQLPYVLGSAHQGCLPPFPADVFMVPQYGYLTLNNGSQAVGRSSFYCLEYFPS
QMLRTGNNFTFSYTFEDVPFHSSYAHSQSLDRLMNPLIDQYLYYLSRTNTPSGTTTQSRLQFSQAGASDIRDQSRNWLPG
PCYRQQRVSKTPADNNNSEYSWTGATKYHLNGRDSLVNPGPAMASHKDDEEKFFPQSGVLIFGKQGSEKTNVDIEKVMIT
DEEEIRTTNPVATEQYGSVSTNLQSGNTQAATADVNTQGVLPGMVWQDRDVYLQGPIWAKIPHTDGHFHPSPLMGGFGLK
HPPPQILIKNTPVPANPSTTFSAAKFASFITQYSTGQVSVEIEWELQKENSKRWNPEIQYTSNYNKSVNVDFTVDTNGVY
SEPRPIGTRYLTRNL*
SEQ ID NO: 18
>#387_AAV.FL.linear_-_major_coat_protein_VP1_translation
CHC387N_Adeno-Associated virus isolates in liver tumor, linear form
MAADGYLPDWLEDTLSEGIRQWWKLKPGPPPPKPAERHKDDSRGLVLPGYKYLGPFNGLDKGEPVNEADAAALEHDKAYD
RQLDSGDNPYLKYNHADAEFQERLKEDTSFGGNLGRAVFQAKKRVLEPLGLVEEPVKTAPGKKRPVEHSPAEPDSSSGTG
KSGNQPARKRLNFGQTGDADSVPDPQPLGQPPAAPSGLGTNTMATGSGAPMADNNEGADGVGNSSGNWHCDSTWMGDRVI
TTSTRTWALPTYNNHLYKQISSQSGASNDNHYFGYSTPWGYFDFNRFHCHFSPRDWQRLINNNWGFRPKRLNFKLFNIQV
KEVTQNDGTTTIANNLTSTVQVFTDSEYQLPYVLGSAHQGCLPPFPADVFMVPQYGYLTLNNGSQAVGRSSFYCLEYFPS
QMLRTGNNFTFSYTFEDVPFHSSYAHSQSLDRLMNPLIDQYLYYLSRTNTPSGTTTQSRLQFSQAGASDIRDQSRNWLPG
PCYRQQRVSKTPADNNNSEYSWTGATKYHLNGRDSLVNPGPAMASHKDDEEKFFPQSGVLIFGKQGSEKTNVDIEKVMIT
DEEEIRTTNPVATEQYGSVSTNLQSGNTQAATADVNTQGVLPGMVWQDRDVYLQGPIWAKIPHTDGHFHPSPLMGGFGLK
HPPPQILIKNTPVPANPSTTFSAAKFASFITQYSTGQVSVEIEWELQKENSKRWNPEIQYTSNYNKSVNVDFTVDTNGVY
SEPRPIGTRYLTRNL*
SEQ ID NO: 19
>#2040_AAV.FL.linear_-_major_coat_protein_VP1_translation
CHC2040N_Adeno-Associated virus isolates in liver tumor, linear form
MAADGYLPDWLEDTLSEGIRQWWKLKPGPPPPKPAERHKDDSRGLVLPGYKYLGPFNGLDKGEPVNEADAAALEHDKAYD
RQLDSGDNPYLKYNHADAEFQERLKEDTSFGGNLGRAVFQAKKRVLEPLGLVEEPVKTAPGKKRPVEHSPVEPDSSSGTG
KAGQQPARKRLNFGQTGDADSVPDPQPLGQPPAAPSGLGTTTMATGSGAPMADNNEGADGVGNSSGNWHCDSTWMGDRVI
TTSTRTWALPTYNNHLYKQISSQSGASNDNHYFGYSTPWGYFDFNRFHCHFSPRDWQRLINNNWGFRPKRLNFKLFNIQV
KEVTQNDGTTTIANNLTSTVQVFTDSEYQLPYVLGSAHQGCLPPFPADVFMVPQYGYLTLNNGSQAVGRSSFYCLEYFPS
QMLRTGNNFTFSYTFEDVPFHSSYAHSQSLDRLMNPLIDQYLYYLSRTNTPSGTTTQSRLQFSQAGASDIRDQSRNWLPG
PCYRQQRVSKTAADNNNSEYSWTGATKYHLNGRDSLVNPGPAMASHKDDEEKFFPQSGVLIFGKQGSEKTNVDIEKVMIT
DEEEIRTTNPVATEQYGSVSTNLQSGNTQAATADVNTQGVLPGMVWQDRDVYLQGPIWAKIPHTDGHFHPSPLMGGFGLK
HPPPQILIKNTPVPANPSTTFSAAKFASFITQYSTGQVSVEIEWELQKENSKRWNPEIQYTSNYNKSVNVDFTVDTNGVY
SEPRPIGTRYLTRNL*
SEQ ID NO: 20
>#1449_AAV.FL.linear_-_major_coat_protein_VP1_translation
CHC1449N_Adeno-Associated virus isolates in liver tumor, linear form
MAADGYLPDWLEDTLSEGIRQWWKLKPGPPPPKPAERHKDDNRGLVLPGYKYLGPFNGLDKGEPVNEADAAALEHDKAYD
RQLDSGDNPYLKYNHADAEFQERLKEDTSFGGNLGRAVFQAKKRVLEPLGLVEEPVKTAPGKKRPVEHSPVEPDSSSGTG
KSGQQPARKRLNFGQTGDADSVPDPQPLGQPPAAPSGLGTNTMATGSGAPMADNNEGADGVGNSSGNWHCDSTWMGDRVI
TTSTRTWALPTYNNHLYKQISSQSGASNDNHYFGYSTPWGYFDFNRFHCHFSPRDWQRLINNNWGFRPKRLNFKLFNIQV
KEVTQNDGTTTIANNLTSTVQVFTDSEYQLPYVLGSAHQGCLPPFPADVFMVPQYGYLTLNNGSQAVGRSSFYCLEYFPS
QMLRTGNNFTFSYTFEDVPFHSSYAHSQSLDRLMNPLIDQYLYYLSRTNTPSGTTTQSRLQFSQAGASDIRDQSRNWLPG
PCYRQQRVSKTPADNNNSEYSWTGATKYHLNGRDSLVNPGPAMASHKDDEEKFFPQSGVLIFGKQGSEKTNVDIEKVMIT
DEEEIRTTNPVATEQYGTVSTNLQSGNTQAATSDVNTQGILPGMVWQDRDVYLQGPIWAKIPHTDGHFHPSPLMGGFGLK
HPPPQILIKNTPVPANPSTTFSAAKFASFITQYSTGQVSVEIEWELQKENSKRWNPEIQYTSNYNKSVNVDFTVDTNGVY
SEPRPIGTRYLTRNL*
SEQ ID NO: 21
>#2128_AAV.FL.linear_-_major_coat_protein_VP1_translation
CHC2128N_Adeno-Associated virus isolates in liver tumor, linear form
MAADGYLPDWLEDTLSEGIRQWWKLKPGPPPPKPAERHKDDSRGLVLPGYKYLGPFNGLDKGEPVNEADAAALEHDKAYD
RQLDSGDNPYLKYNHADAEFQERLKEDTSFGGNLGRAVFQAKKRVLEPLGLVEEPVKTAPGKKRPVEHSPAEPDSSSGTG
KAGNQPARKRLNFGQTGDADSVPDPQPLGQPPAAPSGLGTNTMATGSGAPMADNNEGADGVGNSSGNWHCDSTWMGDRVI
TTSTRTWALPTYNNHLYKQISSQSGASNDNHYFGYSTPWGYFDFNRFHCHFSPRDWQRLINNNWGFRPKRLNFKLFNIQV
KEVTQNDGTTTIANNLTSTVQVFTDSEYQLPYVLGSAHQGCLPPFPADVFMVPQYGYLTLNNGSQAVGRSSFYCLEYFPS
QMLRTGNNFTFSYTFEDVPFHSSYAHSQSLDRLMNPLIDQYLYYLSRTNTPSGTTTQSRLQFSQAGASDIRDQSRNWLPG
PCYRQQRVSKTSADNNNSEYSWTGATKYHLNGRDSLVNPGPAMASHKDDEEKFFPQSGVLIFGKQGSEKTNVEKVMITDE
EEIRTTNPVATEQYGAVSTNLQSGNTQAATADVNTQGVLPGMVWQDRDVYLQGPIWAKIPHTDGHFHPSPLMGGFGLKHP
PPQILIKNTPVPANPSTTFSAAKFASFITQYSTGQVSVEIEWELQKENSKRWNPEIQYTSNYNKSVNVDFTVDTNGVYSE
PRPIGTRYLTRNL*
SEQ ID NO: 22
>#2141_AAV.FL.linear_-_major_coat_protein_VP1_translation
CHC2141N_Adeno-Associated virus isolates in liver tumor, linear form
MAADGYLPDWLEDTLSEGIRQWWKLKPGPPPPKPAERHKDDSRGLVLPGYKYLGPFNGLDKGEPVNEADAAALEHDKAYD
RQLDSGDNPYLKYNHADAEFQERLKEDTSFGGNLGRAVFQAKKRVLEPLGLVEEPVKTAPGKKRPVEHSPVEPDSSSGTG
KAGNQPARKRLNFGQTGDADSVPDPQPLGQPPAAPSGLGTNTMATGSGAPMADNNEGADGVGNSSGNWHCDSTWMGDRVI
TTSTRTWALPTYNNHLYKQISSQSGASNDNHYFGYSTPWGYFDFNRFHCHFSPRDWQRLINNNWGFRPKRLNFKLFNIQV
KEVTQNDGTTTIANNLTSTVQVFTDSEYQLPYVLGSAHQGCLPPFPADVFMVPQYGYLTLNNGSQAVGRSSFYCLEYFPS
QMLRTGNNFTFSYTFEDVPFTSRYAHSQSLDRLMNPLIDQYLYYLSRTNTPSGTTTQSRLQFSQAGASDIRDQSRNWLPG
PCYRQQRVSKTSADNNNSEYSWTGATKYHLNGRDSLVNPGPAMASHKDDEEKFFPQSGVLIFGKQGSEKTNVDIEKVMIT
DGEEIRTTNPVATEQYGSVSTNLQRGNTQAATADVNTQGVLPGMVWQDRDVYLQGPIWAKIPHTDGHFHPSPLMGGFGLK
HPPPQILIKNTPVPANPSTTFSAAKFASFITQYSTGQVSVEIEWELQKENSKRWNPEIQYTSNYNKSVNVDFTVDTNGVY
SEPRPIGTRYLTRNL*
SEQ ID NO: 23
>#1343_AAV.FL.linear_-_major_coat_protein_VP1_translation
CHC1343N_Adeno-Associated virus isolates in liver tumor, linear form
MAADGYLPDWLEDTLSEGIRQWWKLKPGPPPPKPAERHKDDSRGLVLPGYKYLGPFNGLDKGEPVNEADAAALEHDKAYD
RQLDSGDNPYLKYNHADAEFQERLKEDTSFGGNLGRAVFQAKKRVLEPLGLVEEPVKTAPGKKRPVEHSPVEPDSSSGTG
KAGQQPARKRLNFGQTGDADSVPDPQPLGQPPAAPSGLGTNTMATGSGAPMADNNEGADGVGNSSGNWHCDSTWMGDRVI
TTSTRTWALPTYNNHLYKQISSQSGASNDNHYFGYSTPWGYFDFNRFHCHFSPRDWQRLINNNWGFRPKRLNFKLFNIQV
KEVTQNDGTTTIANNLTSTVQVFTDSEYQLPYVLGSAHQGCLPPFPADVFMVPQYGYLTLNNGSQAVGRSSFYCLEYFPS
QMLRTGNNFTFSYTFEDVPFHSSYAHSQSLDRLMNPLIDQYLYYLSKTNAPSGTTTMSRLQFSQAGASDIRDQSRNWLPG
PCYRQQRVSKTAADNNNSDYSWTGATKYHLNGRDSLVNPGTAMASHKDDEEKYFPQSGVLIFGKQDSGKTNVDIEKVMIT
DEEEIRTTNPVATEQYGSVSTNLQSGNTQAATSDVNTQGVLPGMVWQDRDVYLQGPIWAKIPHTDGHFHPSPLMGGFGLK
HPPPQILIKNTPVPANPSTTFSAAKFASFITQYSTGQVSVEIEWELQKENSKRWNPEIQYTSNYNKSVNVDFTVDTNGVY
SEPRPIGTRYLTRNL*
SEQ ID NO: 24
>#777_AAV.FL.linear_-_major_coat_protein_VP1_translation
CHC777N_Adeno-Associated virus isolates in liver tumor, linear form
MAADGYLPDWLEDTLSEGIRQWWKLKPGPPPPKPAERHKDDSRGLVLPGYKYLGPFNGLDKGEPVNEADAAALEHDKAYD
RQLDSGDNPYLKYNHADAEFQERLKEDTSFGGNLGRAVFQAKKRVLEPLGLVEEPVKTAPGKKRPVEHSPVEPDSSSGTG
KAGQQPARKRLNFGQTGDADSVPDPQPLGQPPAAPSGLGTNTMATGSGAPMADNNEGADGVGNSSGNWHCDSTWMGDRVI
TTSTRTWALPTYNNHLYKQISSQSGASNDNHYFGYSTPWGYFDFNRFHCHFSPRDWQRLINNNWGFRPKRLNFKLFNIQV
KEVTQNDGTTTIANNLTSTVQVFTDSEYQLPYVLGSAHQGCLPPFPADVFMVPQYGYLTLNNGSQAVGRSSFYCLEYFPS
QMLRTGNNFTFSYTFEDVPFHSSYAHSQSLDRLMNPLIDQYLYYLSKTNAPSGTTTMSRLQFSQAGASDIRDQSRNWLPG
PCYRQQRVSKTAADNNNSDYSWTGATKYHLNGRDSLVNPGTAMASHKDDEEKYFPQSGVLIFGKQDSGKTNVDIEKVMIT
DEEEIRTTNPVATEQYGSVSTNLQSGNTQAATSDVNTQGVLSGMVWQDRDVYLQGPIWAKIPHTDGHFHPSPLMGGFGLK
HPPPQILIKNTPVPANPSTTFSAAKFASFITQYSTGQVSVEIEWELQKENSKRWNPEIQYTSNYNKSVNVDFTVDTNGVY
SEPRPIGTRYLTRNL*
SEQ ID NO: 25
>#3511_AAV.FL.linear_-_major_coat_protein_VP1_translation
CHC3511N_Adeno-Associated virus isolates in liver tumor, linear form
MAADGYLPDWLEDTLSEGIRQWWKLKPGPPPPKPAERHKDDSRGLVLPGYKYLGPFNGLDKGEPVNEADAAALEHDKAYD
RQLDSGDNPYLKYNHADAEFQERLKEDTSFGGNLGRAVFQAKKRVLEPLGLVEEPVKTAPGKKRPVEHSPAEPDSSSGTG
KSGQQPARKRLNFGQTGDADSVPDPQPLGQPPAAPSGLGTNTMATGSGAPMADNNEGADGVGNSSGNWHCDSTWMGDRVI
TTSTRTWALPTYNNHLYKQISSQSGASNDNHYFGYSTPWGYFDFNRFHCHFSPRDWQRLINNNWGFRPKRLSFKLFNIQV
KEVTQNDGTTTIANNLTSTVQVFTDSEYQLPYVLGSAHQGCLPPFPADVFMVPQYGYLTLNNGSQAVGRSSFYCLEYFPS
QMLRTGNNFTFSYTFEDVPFHSSYAHSQSLDRLMNPLIDQYLYYLSRTNTPSGTTTMSRLQFSQAGASDIRDQSRNWLPG
PCYRQQRVSKTAADNNNSDYSWTGATKYHLNGRDSLVNPGPAMASHKDDEEKYFPQSGVLIFGKQDSGKTNVDIEKVMIT
DEEEIRTTNPVATEQYGSVSTNLQSGNTQAATSDVNTQGVLPGMVWQDRDVYLQGPIWAKIPHTDGHFHPSPLMGGFGLK
HPPPQILIKNTPVPANPSTTFSAAKFASFITQYSTGQVSVEIEWELQKENSKRWNPEIQYTSNYNKSVNVDFTVDTNGVY
SEPRPIGTRYLTRNL*
SEQ ID NO: 26
>#3013_AAV.FL.linear_-_major_coat_protein_VP1_translation
CHC3013N_Adeno-Associated virus isolates in liver tumor, linear form
MAADGYLPDWLEDTLSEGIRQWWKLKPGPPPPKPAERHKDDSRGLVLPGYKYLGPFNGLDKGEPVNEADAAALEHDKAYD
RQLDSGDNPYLKYNHADAEFQERLKEDTSFGGNLGRAVFQAKKRVLEPLGLVEEPVKTAPGKKRPVEHSPAEPDSSSGTG
KAGQQPARKRLNFGQTGDADSVPDPQPLGQPPAAPSGLGTNTMATGSGAPMADNNEGADGVGNSSGNWHCDSTWMGDRVI
TTSTRTWALPTYNNHLYKQISSQSGASNDNHYFGYSTPWGYFDFNRFHCHFSPRDWQRLINNNWGFRPKRLNFKLFNIQV
KEVTQNDGTTTIANNLTSTVQVFTDSEYQLPYVLGSAHQGCLPPFPADVFMVPQYGYLTLNNGSQAVGRSSFYCLEYFPS
QMLRTGNNFTFSYTFEDVPFHSSYAHSQSLDRLMNPLIDQYLYYLSRTNTPSGTTTMSRLQFSQAGASDIRDQSRNWLPG
PCYRQQRVSKTAADNNNSDYSWTGATKYHLNGRDSLVNPGPAMASHKDDEEKYFPQSGVLIFGKQDSGKTNVDIEKVMIT
DEEEIRTTNPVATEQYGSVSTNLQSGNTQAATSDVNTQGVLPGMVWQDRDVYLQGPIWAKIPHTDGHFHPSPLMGGFGLK
HPPPQILIKNTPVPANPSTTFSAAKFASFITQYSTGQVSVEIEWELQKENSKRWNPEIQYTSNYNKSVNVDFTVDTNGVY
SEPRPIGTRYLTRNL*
SEQ ID NO: 27
>#2208_AAV.FL.linear_-_major_coat_protein_VP1_translation
CHC2208N_Adeno-Associated virus isolates in liver tumor, linear form
MAADGYLPDWLEDTLSEGIRQWWKLKPGPPPPKPAERHKDDSRGLVLPGYKYLGPFNGLDKGEPVNEADAAALEHDKAYD
RQLDSGDNPYLKYNHADAEFQERLKEDTSFGGNLGRAVFQAKKRVLEPLGLVEEPVKTAPGKKRPVEHSPAEPDSSSGTG
KSGQQPARKRLNFGQTGDADSVPDPQPLGEPPAAPTSLGSTTMASGGGAPVADNNEGADGVGNSSGNWHCDSQWLGDRVI
TTSTRTWALPTYNNHLYKQISSQSGASNDNHYFGYSTPWGYFDFNRFHCHFSPRDWQRLINNNWGFRPKRLNFKLFNIQV
KEVTQNDGTTTIANNLTSTVQVFTDSEYQLPYVLGSAHQGCPPPFPADVFMVPQYGYLTLNNGSQAVGRSSFYCLEYFPS
QMLRTGNNFTFSYTFEDVPFHSSYAHSQSLDRLMNPLIDQYLYYLSRTNTPSGTTTQSRLQFSQAGASDIRDQSRNWLPG
PCYRQQRVSKTAADNNNSEYSWTGATKYHLNGRDSLVNPGPAMASHKDDEEKFFPQSGVLIFGKQGSEKTNVDIEKVMIT
DEEEIRTTNPVATEQYGSVSTNLQSGNTQAATSDVNTQGVLPGMVWQDRDVYLQGPIWAKIPHTDGHFHPSPLMGGFGLK
HPPPQIMIKNTPVPANPPTNFSSAKFASFITQYSTGQVSVEIEWELQKENSKRWNPEIQYTSNYNKSVNVDFTVDTNGVY
SEPRPIGTRYLTRNL*
SEQ ID NO: 28
>#129_AAV.FL.linear_-_major_coat_protein_VP1_translation
CHC129N_Adeno-Associated virus isolates in liver tumor, linear form
MAADGYLPDWLEDTLSEGIRQWWKLKPGPPPPKPAERHQDDSRGLVLPGYKYLGPFNGLDKGEPVNEADAAALEHDKAYD
RQLDSGDNPYLKYNHADAEFQERLKEDTSFGGNLGRAVFQAKKRVLEPLGLVEEPVKTAPGKKRPVEHSPAEPDSSSGTG
KAGQQPARKRLNFGQTGDADSVPDPQPLGQPPAAPTSLGSTTMATGSGAPMADNNEGADGVGNSSGNWHCDSQWLGDRVI
TTSTRTWALPTYNNHLYKQISSQSGASNDNHYFGYSTPWGYFDFNRFHCHFSPRDWQRLINNNWGFRPKRLNFKLFNIQV
KEVTQNDGTTTIANNLTSTVQVFTDSEYQLPYVLGSAHQGCLPPFPADVFMVPQYGYLTLNNGSQAVGRSSFYCLEYFPS
QMLRTGNNFTFSYTFEDVPFHSSYAHSQSLDRLMNPLIDQYLYYLNRTQTXSGTPTQSRLLFSQAGPTSMSLQAKNWLPG
PCYRQQRLSKQANDNNNSNFPWTGATKYHLNGRDSLVNPGPAMASHKDDEEKFFPMHGTLIFGKQGSEKTNAELENVMIT
DEEEIRTTNPVATEQYGSVSTNLQRGNRQAATADVNTQGVLPGMVWQDRDVYLQGPIWAKIPHTDGHFHPSPLMGGFGLK
HPPPQILIKNTPVPANPSTTFSAAKFASFITQYSTGQVSVEIEWELQKENSKRWNPEIQYTSNYNKSVNVDFTVDTNGVY
SEARPIGTRYLTRNL*
SEQ ID NO: 29
>#2731_AAV.FL.linear_-_major_coat_protein_VP1_translation
CHC2731N_Adeno-Associated virus isolates in liver tumor, linear form
MAADGYLPDWLEDTLSEGIRQWWKLKPGPPPPKPAERHKDDSRGLVLPGYKYLGPFNGLDKGEPVNEADAAALEHDKAYD
RQLDSGDNPYLKYNHADAEFQERLKEDTSFGGNLGRAVFQAKKRVLEPLGLVEERVKTAPGKKRPVAVAHQWQTITRVPM
EWVIPQEKRLNFGQTGDADWHCDPQPLGQPPAAPSGLGSTTMATGSGALLLLESLSADGVGNSSGNWHCDSQWLGDRVIT
TSTRTWALPTYNNHLYKQISSQSGASNDNHYFGYSTPWGYFDFNRFHCHFSPRDWQRLINNNWGFRPKRLNFKLFNIQVK
EVTQNDGTTTIANNLTSTVQVFTDSEYQLPYVLGSAHQGCLPPFPADVFMVPQYGYLTLNNGSQAVGRSSFYCLEYFPSQ
MLRTGNNFQFSYTFEDVPFHSSYAHSQSLDRLMNPLIDQYLYYLNKTQSNSGTTTMSRLLFSQAGPTSMSLHAKNWLPGP
CYRQQRLSKQANDNNNSNFPWTAATKYHLNGSDSLINPGPAMASHKDDEEKFFPQSGVLIFGKQGSEKTNVDIEKVMITD
EEEIRTTNPVATEQYGSVSTNLQRGNRRAATADVNTQGVLPGMVWQDRDVYLQGPIWAKIPHTDGHFHPSPLMGGFGLKH
PPPQILIKNTPVPANPSTTFSAAKFASFITQYSTGQVSVEIEWELQKENSKRWNPEIQYTSNYNKSVNVDFTVDTNGVYS
EPRPIGTRYLTRNL*
SEQ ID NO: 30
>#1602_AAV.FL.linear_-_major_coat_protein_VP1_translation
CHC1620N_Adeno-Associated virus isolates in liver tumor, linear form
MAADGYLPDWLEDTLSEGIRQWWKLKPGPPPPKSAERHKDDSRGLVLPGYKYLGPFXGLDKGEPVNEADAAALEHDKAYD
RQLDSGDNPYLKYNHADAEFQERLKEDTSFGGNLGRAVFQAKKRVLXPLGXVEEPVKTAPGKKRPVEHSPVEPDSSSGTG
KAGQQPARKRLNFGQTGDSDSSSRDMRKVESAAAPTSLGSTTMASGGGAPVADNNEGADGVGNSSGNWHCDSQWLGDRVI
TTSTRTWALPTYNNHLYKQISSQSGASNDNHYFGYSTPWGYFDFNRFHCHFSPRDWQRLINNNWGFRPKRLNFKLFNIQV
KEVTQNDGTTTIANNLTSTVQVFTDSEYQLPYVLGSAHQGCLPPFPADVFMVPQYGYLTLNNGSQAVGRSSFYCLEYFPS
QMLRTGNNFQFSYTFEDVPFHSSYAHSQSLDRLMNPLIDQYLYYLNKTQTNSGTLQQSRLLFSQAGPTNMSLQAKNWLPG
PCYRQQRLSKQANDNNNSNFPWTAATKYHLNGRDSLVNPGPAMASHKDDEEKFFPQSGVLIFGKQGSEKTNVDIEKVMIT
DEEEIRTTNPVATEQYGSVSTNLQRGNRQAATADVNTQGVLPGMVWQDRDVYLQGPIWAKIPHTDGHFHPSPLMGGFGLK
HPPPQILIKNTPVPANPSTTFSAAKFASFITQYSTGQVSVEIEWELQKEXSKRWNPEIQYTSNYNKSVNVDFTVDTNGVY
SEPRPIGTRYLTRNL*
SEQ ID NO: 31
>#1010_AAV.FL.linear_-_major_coat_protein_VP1_translation
CHC1010N_Adeno-Associated virus isolates in liver tumor, linear form
MAADGYLPDWLGETLSQGIRQWWKLKPGPPPPKPAERHKXDSRGLVLPGYKYLGPFNGLDKGEPVNEADAAALEHDKAYD
RQLDSGHIPYLKYNHADAEFQERLKEDTSFGGNLGRAVFQAKKRVLEPLGLVEEPVKTAPGKKRPVEHSPVEPDSSSGTG
KAGQQPARKRLNFGQTGDADSVPDPQPLGQPPAAPSGLGTTTMATGSGAPVADNNEGADGVGNSSGNWHCDSQWLGDRVI
TTSTRTWALPTYNNHLYNFFQIKINASNDNHYFGYSTPWGYFDFNRFHCHFSPRDWQRLINNNWGFRPKRLNFKLFLIQV
KEVTQNDGTTTIANNLTSTVQVFTXSEYQLPYVLGSAHQGCXPPFPADVFMVPQYGYLTLNNGSQAXGRSSFYCLEYFPS
QMLRTGNNFQFSYTFEDVPFHSSYAHSQSLDRLMNPLIDQYLYYLNKTQSNSGTLQQSRLLFSQAGPTSMSLQAKNWLPG
PCYRQQRVSKTSADNNNSEYSWTGATKYHLNGRDSLVNPGPAMASHKDDEEKFFPQSGVLIFGKQGSEKTNVDIEKVMIT
DEEEIRTTNPVATEQYGYVSNNLQNSNRQAATADVNTQGVLPGMVWQDRDVYLQGPIWAKIPHTDGHFHPSPLMGGFGLK
HPPPQILIKNTPVPANPPTNFSSAKFASFITQYSTGQVSVEIEWELQKENSKRWNPEIQYTSNYNKSVNVDFTVDTNGVY
SEPRPIGTRYLTRNL*
SEQ ID NO: 32
>#985_AAV.FL.linear_-_major_coat_protein_VP1_translation
CHC985N_Adeno-Associated virus isolates in liver tumor, linear form
MAADGYLPDWLEDTPSAGISQWWKLKPGPPPPKPAERHKDDSRGLVLPGYKYLGPFNGLDKGEPVNEADAAALEHDKAYD
RQLDSGDNPYLKYNHADAEFQERLKEDTSFGGNLGRAVFQAKKRVLEPLGLVEEPVKTAPGKKRPVEHSPVEPDSSSGTG
KAGQQPARKRLNFGQTGDADSVPDPQPLGQPPAAPSGLGTNTMATGSGAPMADNNEGADGVGNSSGNWHCDSQWLGDRVI
TTSTRTWALPTYNNHLYKQISSQSGASNDNHYFGYSTPWGYFDFNRFHCHFSPRDWQRLINNNWGFRPKKLNFKLFNIQV
KEVTQNDGTTTIANNLTSTVQVFTGSGYGLRYVLGSAHQGCLPPFPADVFMVPQYGYLTLNNGSQAVGRSSFYCLEYFPS
QMLRTGNNFQFSYTFEDVPFHSSYAHSQSLDRLMNPLIDQYLYYLNKTQSNSGTLQQSRLQFSQAGASDIRDQSRNWLPG
PCYRQQRVSKTSADNNNSEYSWTGATKYHLNGRDSLVNPGPAMASHKDDEEKFFPQSGVLIFGKQGSEKTNVDIEKVMIT
DEEEIRTTNPVATEQYGYVSNNLQNSNTGPTTGTVNHQGALPGMVWQDRDVYLQGPIWAKIPHTDGHFHPSPLMGGFGLK
HPPPQIMIKNTPVPANPPTNFSSAKFASFITQYSTGQVSVEIEWELQKENSKRWNPEIQYTSNYNKSVNVDFTVDTNGVY
SEPRPIGTRYLTRNL*
SEQ ID NO: 33
>#667_AAV.FL.linear_-_major_coat_protein_VP1_translation
CHC667N_Adeno-Associated virus isolates in liver tumor, linear form
MAADGYLPDWLEDTLSEGIRQWWKLKPGPPPPKPAERHKDDSRGLVLPGYKYLGPFNGLDKGEPVNEADAAALEHDKAYD
RQLDSGDNPYLKYNHADAEFQERLKEDTSFGGNLGRAVFQAKKRVLEPLGLVEEPVKTAPGKKRPVEHSPVEPDSSSGTG
KAGQQPARKRLNFGQTGDADSVPDPQPLGQPPAAPSGLGTNTMATGSGAPMEDNNEGADGVGNSSGNWHCDSQWLGDRVI
TTSTRTWALPTYNNHLYKQICSQSGASNDNHYFGYSTRWGDFDFNRFHCHFSPRDWQRLINNNWGFRPKRLNFKLFNIQV
KEVTQNDGTXTIANNLTSTVQVFTDSEYQLPYVLGSAHQGCLPPFPADVFMVPQYGYLTLNNGSQAVGRSSFYCLEYFPS
QMLRTGNNFTFSYTFEDVPFHSSYAHSQSLDRLMNPLIDQYLYYLSRTNTPSGTTTQSRLLFSQAGPTSMSLQAKNWLPG
PCYRQQRLSKQANDNNNSNFPWTAATKYHLNGRDSLVNPGPAMASHKDDEEKFFPQSGVLIFGKQGSEKTNVDIEKVMIT
DEEEIRTTNPVATEQYGYVSNNLQNSNTGPTTGTVNHQGALPGMVWQDRDVYLQGPIWAKIPHTDGHFHPSPLMGGFGLK
HPPPQIMIKSSXVPANPPTNFSSAKFASFITQYSTGQVSVEIEWELQKENSKRWNPEIQYTSNYNKSVNVDFTVDTNGVY
SEPRPIGTRYLTRNL*
SEQ ID NO: 34
>#2806_AAV.FL.linear_-_major_coat_protein_VP1_translation
CHC2806N_Adeno-Associated virus isolates in liver tumor, linear form
MAADGYLPDWLEDTLSEGIRQWWKLKPGPPPPKPAERHKDNSRGLVLPGYKYLGPFNGLDKGEPVNEADAAALEHDKAYD
RQLDSGDNPYLKYNHADAEFQERLKEDTSFGGNLGRAVFQAKKRVLEPLGLVEEPVKTAPGKKRPVEHSPVEPDSSSGTG
KAGQQPAKKRLKFGQTGDADSVPDPQPLGQPPAAPSGLGSTTMATGSGAPMADNNEGADGVGNSSGNWHCDSTWMGDRVI
TTSTRTWALPTYNNHLYKQISSQSGASNDNHYFGYSTPWGYFDFNRFHCHFSPRDWQRLINNNWGFRPKRLNFKLFNIQV
KEVTQNDGTTTIANNLTSTVQVFTDSEYQLPYVLGSAHQGCLPPFPADVFMVPQYGYLTLNNGSQAVGRSSFYCLEYFPS
QMLRTGNNFTFSYTFEDVPFHSSYAHSQSLDRLMNPLIDQYLYYLNKTQSNSETTFSSATPLKTFLSTAATLTARVWLPG
PCYRQQRLSKQANDNNNSNFPWTAATKYHLNGRDSLVNPGPAMASHKDDEEKFFPQSGVLIFGKQGSEKTNVDIEKVMIT
DEEEIRTTNPVATEQYGYVSNNLQNSNTGPTTGTVNHQGALPGMVWQDRDVYLQGPIWAKIPHTDGHFHPSPLMGGFGLK
HPPPQIMIKNTPVPANPPTNFSSAKFASFITQYSTGQVRVEIEWELQKENSKRWNPEIQYTSNYNKXVNVDFTVDTNGVY
SEXRPIXTRXLTRNL*
SEQ ID NO: 35
>#217_AAV.FL.linear_-_major_coat_protein_VP1_translation
CHC217N_Adeno-Associated virus isolates in liver tumor, linear form
MAADGYLPDWLEDTLSEGIRQWWKLKPGPPPPKPAERHKDDSRGLVLPGYKYLGPFNGLDKGEPVNEADAAALEHDKAYD
RQLDSGDNPYLKYNHADAEFQERLKEDTSFGGNLGRAVFQAKKRVLEPLGLVEEPVKTAPGKKRPVEHSPVEPDSSSGTG
KAGQQPARKRLNFGQTGDADSVPDPQPLGQPPAAPSGLGSTTMATGSGAPVADNNEGADGVGNSSGNWHCDSQWLGDRVI
TTSTRTWALPTYNNHLYKQISSQSGASNDNHYFGYSTPWGYFDFNRFHCHFSPRDWQRLINNNWGFRPKRLNFKLFNIQV
KEVTQNDGTKTPANNLTSTVQVFTDSEYQLPYVLGSAHQGCLPPFPADVFMVPQYGYLTLNNGSQAVGRSSFYCLEYFPS
QMLRTGNNFTFSYTFEDVPFHSSYAHSQSLDRLMNPLIDQYLYYLNKTQSNSGTNTQSRLQFSQAGASDIRDQSRNWLPG
PCYRQQRLSKQANDNNNSNFPWTGATKYHLNGRDSLVNPGPAMASHKDDEEKFFPMHGTLIFGKQGTNANDADLDNVMIT
DEEEIRTTNPVATEQYGYVSNNLQNSNTGPTTGTVNHQGALPGMVWQDRDVYLQGPIWAKIPHTDGHFHPSPLMGGFGLK
HPPPQIMIKNTPVPANPPTNFSSAKFASFITQYSTGQVSVEIEWELQKENSKRWNPEIQYTSNYNKSVNVDFTVDTNGVY
SEPRPIGTRYLTRNL*
SEQ ID NO: 36
>#767_AAV.FL.linear_-_major_coat_protein_VP1_translation
CHC767N_Adeno-Associated virus isolates in liver tumor, linear form
MAADGYLPDWLEDTLSEGIRQWWKLKPGPPPPKPAERHKDDSRGLVLPGYKYLGPFNGLDKGEPVNEADAAALEHDKAYD
RQLDSGDNPYLKYNHADAEFQERLKEDTSFGGNLGRAVFQAKKRVLEPLGLVEEPVKTAPGKKRPVEHSPAEPDSSSGTG
KAGQQPARKRLNFGQTGDADSVPDPQPLGQPPAAPSGLGSTTMATGSGAPVADNNEGADGVGNSSGNWHCDSQWLGDRVI
TTSTRTWALPTYNNHLYKQISSQSGASNHYFGYSTPWGYFDFNRFHCHFSPRDWQRLINNNWGFRPKRLNFKLFNIQVKE
VTQNDGTTTIANNLTSTVQVFTDSEYQLPYVLGSAHQGCLPPFPADVFMVPQYGYLTLNNGSQAVGRSSFYCLEYFPSQM
LRTGNNFTFSYTFEDVPFHSSYAHSQSLDRLMNPLIDQYLYYLNKTQSSGTLQQSRLLFSQAGPTSMSLQARNWLPGPCY
RQQRVSKTSADKNNSEYSWTAATKYHLNGRDSLVNPGPAMASHKDDEEKFFPMPGTLIFGKEGTNANNAELENVMITDEE
EIRTTNPVATEQYGYVSNNLQNSNTGPTTGTVNHQGALPGMVWQDRDVYLQGPIWAKIPHTDGHFHPSPLMGGFGLKHPP
PQIMIKNTPVPANPPTNFSAAKFASFITQYSTGQVSVEIEWELQKENSKRWNPEIQYTSNYNKSVNVDFTVDTNGVYSEP
RPIGTRYLTRNL*
SEQ ID NO: 37
>#1591_AAV.FL.linear_-_major_coat_protein_VP1_translation
CHC1591N_Adeno-Associated virus isolates in liver tumor, linear form
MAADGYLPDWLEDTLSEGIRQWWKLKPGPPPPKPAERHKDDSRGLVLPGYKYLGPFNGLDKGEPVNEADAAALEHDKAYD
RQLDSGDNPYLKYNHADAEFQERLKEDTSFGGNLGRAVFQAKKRVLEPLGLVEEPVKTAPGKKRPVEHSPAEPDSSSGTG
KAGQQPARKRLNFGQTGDADSVPDPQPLGQPPAAPSGLGSTTMATGSGAPVADNNEGADGVGNSSGNWHCDSQWLGDRVI
TTSTRTWALPTYNNHLYKQISSQSGASNDNHYFGYSTPWGYFDFNRFHCHFSPRDWQRLINNNWGFRPKRLNFKLFNIQV
KEVTQNDGTTTIANNLTSTVQVFTDSEYQLPYVLGSAHQGCLPPFPADVFMVPQYGYLTLNNGSQAVGRSSFYCLEYFPS
QMLRTGNNFQFSYTFEDVPFHSSYAHSQSLDRLMNPLIDQYLYYLNKTQSNSGTLQQSRLLFSQAGASDIRDQSRNWLPG
PCYRQQRVSKTSADNNNSNFPWTAATKYHLNGRDSLVNPGPAMASHKDDEEKFFPMHGTLIFGKQGTNANDADLDNVMIT
DEEEIRTTNPVATEQYGYVSNNLQNSNTGPTTGTVNHQGALPGMVWQDRDVYLQGPIWAKIPHTDGHFHPSPLMGGFGLK
HPPPQIMIKNTPVPANPPTNFSSAKFASFITQYSTGQVSVEIEWELQKENSKRWNPEIQYTSNYNKSVNVDFTVDTNGVY
SEPRPIGTRYLTRNL*
SEQ ID NO: 38
>#508_AAV.FL.linear_-_major_coat_protein_VP1_translation
CHC508N_Adeno-Associated virus isolates in liver tumor, linear form
MAADGYLPDWLEDTLSEGIRQWWKLKPGPPPPKPAERHKDDSRGLVLPGYKYLGPFNGLDKGEPVNEADAAAIEHDKAYD
RQLDSGDNPYLKYNHADAEFQERLKEDTSFGGNLGRAVFQAKKRVLEXXGLVEEPVKTAPGKKRPVAHSPAEPDSSSGTG
KAGNQPARKRLNFGQTGDADSVPDPQPLGQPPAAPTSLGSTTMATGSGAPMADNNEGADGVGNSSGNWHCDSTWMGDRVI
TTSTRTWALPTYNNHLYKQISSQSGASNDNHYFGYSTPWGYFDFNRFHCHFSPRDWQRLINNNWGFRPKRLNFKLFNIQV
KEVTQNDGTTTIANNLTSTVQVFTDSEYQLPYVLGSAHQGCLPPFPADVFMVPQYGYLTLNNGSQAVGRSSFYCLEYFPS
QMLRTGNNFQFSYTFEDVPFHSSYAHSQSLDRLMNPLIDQYLYYLNRTQTASGTQQSRLLFSQAGPTSMSLQAKNWLPGP
CYRQQRLSKQANDNNNSNYSWTGATKYHLNGRDSLVXPGPAMASHXDDEXKFFPMHGTLIFGKEGTNATNADLDNVMITD
EEEIRTTNPVATEQYGYVSNNLQNSNTAATTETVNHQGALPGMVWQDRDVYLQGPIWAKIPHTDGHFHPSPLMGGFGLKN
PPPQIMIKNTPVPANPPTNFSSAKFASFITQYSTGQVSVEIEWELQKENSKRWNPEIQYTSNYNKSVNVDFTVDTNGVYS
EPRPIGTRYLTRNL*
SEQ ID NO: 39
>#1704_AAV.FL.linear_-_major_coat_protein_VP1_translation
CHC1704N_Adeno-Associated virus isolates in liver tumor, linear form
MAADGYLPDWLEDTLSEGIRQWWKLKPGPPPPKPAERHKDDSRGLVLPGYKYLGPFNGLDKGEPVNEADAAALEHDKAYD
RQLDSGDNPYLKYNHADAEFQERLKEDTSFGGNLARAVFQAKKRVLEPLGLVEEPVKTAPGKKRPVEHSPAEPDSSSGTG
KSGNQPARKRLNFGQTGDADSVPDPQPLGQPPAAPSGLGSTTMATGSGAPVADNNEGADGVGNSSGNWHCDSQWLGDRVI
TTSTRTWALPTYNNHLYKQISSQSGASNDNHYFGYSTPWGYFDFNRFHCHFSPRDWQRLINNNWGFRPKRLNFKLFNIQV
KEVTQNDGTTTIANNLTSTVQVFTDSEYQLPYVLGSAHQGCLPPFPADVFMVPQYGYLTLNNGSQAVGRSSFYCLEYFPS
QMLRTGNNFTFSYTFEDVPFHSSYAHSQSLDRLMNPLIDQYLYYLNKTQTNSGTLQQSRLLFSQAGPTSMSLQAKNWLPG
PCYRQQRLSKQANDNNNSNFPWTAATKYHLNGRDSLVNPGPAMASHKDDEEKFFPMHGTLIFGKQGTNANDADLENVMIT
DEEEIRTTNPVATEQYGYVSNNLQNSNTGPTTGTVNHQGALPGMVWQDRDVYLQGPIWAKIPHTDGHFHPSPLMGGFGLK
HPPPQIMIKNTPVPANPPTNFSSAKFASFITQYSTGQVSVEIEWELQKENSKRWNPEIQYTSNYNKSVNVDFTVDTNGVY
SEPRPIGTRYLTRNL*
SEQ ID NO: 40
>#2112_AAV.FL.linear_-_major_coat_protein_VP1_translation
CHC2112N_Adeno-Associated virus isolates in liver tumor, linear form
MAADGYLPDWLQENLFFDIRQWWKLKPGPPPPKPAERHQDNSRGLVLPGYKYLGPFNGLDKGEPVNEADAAALEHDKAYD
RQLDSGDNPYLKYNHADAEFQERLKEDTSFGGNLGRAVFQAKKRVLEPLGLVEEPVKTAPGKKRPVEHSPAEPDSSSGTG
KAGXQPAXKRLNFGQTGXADSVPDPQPLGQPPAAPSGLGTNTMATGSGAPVADNNEGADGVGNSSGNWHCDSQWLGDRVI
TTSTRTWALPTYNNHLYKQISSQSGASNDNHYFGYSTPWGYFDFNRFHCHFSPRDWQRLINNNWGFRPKRLNFKLFNIQV
KEVTQNDGTTTIANNLTSTVQVFTDSEYQLPYVLGSAHQGCLPPFPADVFMVPQYGYLTLNNGSQAVGRSSFYCLEYFPS
QMLRTGNNFQFSYTFEDVPFHSSYAHSQSLDRLMNPLIDQYLYYLNKTQSNSGTLQQSRLLFSQAGPTSMSLQAKNWLPG
PCYRQQRLSKQANDNNKAGKRQQQQQLSLDCGYKVSTKWPGPAMASHKDDEEKFFPMHGTLIFGKQGTNANDADLDNVMI
TDEEEIRTTNPVATEQYGYVSNNLQNSNTGPTTGTVNHQGALPGMVWQDRDVYLQGPIWAKIPHTDGHFHPSPLMGGFGL
KHPPPQIMIKNTPVPANPPTNFSSAKFASFITQYSTGQVSVEIEWELQKENSKRWNPEIQYTSNYNKSVNVDFTVDTNGV
YSEPRPIGTRYLTRNL*
SEQ ID NO: 41
>#1350_AAV.FL.linear_-_major_coat_protein_VP1_translation
CHC1350N_Adeno-Associated virus isolates in liver tumor, linear form
MAADGYLPDWLEDTLSEGIRQWWKLKPGPPPPKPAERHKDDSRGLVLPGYKYLGPFNGLDKGEPVNEADAAALEHDKAYD
RQLDSGDNPYLKYNHADAEFQERLKEDTSFGGNLGRAVFQAKKRVLEPLGLVEEPVKTAPGKKRPVEHSPVEPDSSSGTG
KAGQQPARKRLNFGQTGDADSVPDPQPLGQPPAAPSGLGSTTMATGSGAPMADNNEGADGVGNSSGNWHCDSQWLGDRVI
TTSTRTWALPTYNNHLYKQISSQSGASNDNHYFGYSTPWGYFDFNRFHCHFSPRDWQRLINNNWGFRPKRLNFKLFNIQV
KEVTQNDGTTTIANNLTSTVQVFTDSEYQLPYVLGSAHQGCLPPFPADVFMVPQYGYLTLNNGSQAVGRSSFYCLEYFPS
QMLRTGNNFQFSYTFEDVPFHSSYAHSQSLDRLMNPLIDQYLYYLNKTQSNSGTLQQSRLLFSQAGPTSMSLQAKNWLPG
PCYRQQRLSKQANDNNNSNFPWTAATKYHLNGRDSLVNPGPAMASHKDDEEKFFPMHGTLIFGKQGTNANDADLDNVMIT
DEEEIRTTNPVATEQYGYVSNNLQSGNTQAATGTVNHQGALPGMVWQDRDVYLQGPIWAKIPHTDGHFHPSPLMGGFGLK
HPPPQIMIKNTPVPANPPTNFSSAKFASFITQYSTGQVSVEIEWELQKENSKRWNPEIQYTSNYNKSVNVDFTVDTNGVY
SEPRPIGTRYLTRNL*
SEQ ID NO: 42
>#668_AAV.FL.linear_-_major_coat_protein_VP1_translation
CHC668N_Adeno-Associated virus isolates in liver tumor, linear form
MAADGYLPDWLEDTLSEGIRQWWKLKPGPPPPKPAERHKDDNRGLVLPGYKYLGPFNGLDKGEPVNEADAAALEHDKAYD
RQLDSGDNPYLKYNHADAEFQERLKEDTSFGGNLGRAVFQAKKRVLEPLGLVEEPVKTAPGKKRPVEHSPVEPDSSSGTG
KAGQQPARKRLNFGQTGDADSVPDPQPLGQPPAAPSGLGSTTMATGSGAPMADNNEGADGVGNSSGNWHCDSQWLGDRVI
TTSTRTWALPTYNNHLYKQISSQSGASNDNHYFGYSTPWGYFDFNRFHCHFSPRDWQRLINNNWGFRPKRLNFKLFNIQV
KEVTQNDGTTTIANNLTSTVQVFTDSEYQLPYVLGSAHQGCLPPFPADVFMVPQYGYLTLNNGSQAVGRSSFYCLEYFPS
QMLRTGNNFQFSYTFEDVPFHSSYAHSQSLDRLMNPLIDQYLYYLNKTQSNSGTLQQSRLLFSQAGPTSMSLQAKNWLPG
PCYRQQRLSKQANDNNNSNFPWTAATKYHLNGRDSLVNPGPAMASHKDDEEKFFPMHGTLIFGKQGTNANDADLDNVMIT
DEEEIRTTNPVATEQYGYVSNNLQNSNTGPTTGTVNHQGALPGMVWQDRDVYLQGPIWAKIPHTDGHFHPSPLMGGFGLK
HPPPQIMIKNTPVPANPPTNFSSAKFASFITQYSTGQVSVEIEWELQKENSKRWNPEIQYTSNYNKSVNVDFTVDTNGVY
SEPRPIGTRYLTRNL*
SEQ ID NO: 43
>#367_AAV.FL.linear_-_major_coat_protein_VP1_translation
CHC367N_Adeno-Associated virus isolates in liver tumor, linear form
MAADGYLPDWLEDTLSEGIRQWWKLKPGPPPPKPAERHKDDSRGLVLPGYKYLGPFNGLDKGEPVNEADAAALEHDKAYD
RQLDSGDNPYLKYNHADAEFQERLKEDTSFGGNLGRAVFQAKKRVLEPLGLVEEPVKTAPGKKRPVEHSPVEPDSSSGTG
KAGQQPARKRLNFGQTGDADSVPDPQPLGQPPAAPSGLGSTTMATGSGAPVADNNEGADGVGNSSGNWHCDSQWLGDRVI
TTSTRTWALPTYNNHLYKQISSQSGASNDNHYFGYSTPWGYFDFNRFHCHFSPRDWQRLINNNWGFRPKRLNFKLFNIQV
KEVTQNDGTTTIANNLTSTVQVFTDSEYQLPYVLGSAHQGCLPPFPADVFMVPQYGYLTLNNGSQAVGRSSFYCLEYFPS
QMLRTGNNFQFSYTFEDVPFHSSYAHSQSLDRLMNPLIDQYLYYLNKTQSNSGTLQQSRLLFSQAGPTSMSLQAKNWLPG
PCYRQQRLSKQANDNNNSNFPWTAATKYHLNGRDSLVNPGPAMASHKDDEEKFFPMHGTLIFGKQGTNANDADLDNVMIT
DEEEIRTTNPVATEQYGYVSNNLQNSNTGPTTGTVNHQGALPGMVWQDRDVYLQGPIWAKIPHTDGHFHPSPLMGGFGLK
HPPPQIMIKNTPVPANPPTNFSSAKFASFITQYSTGQVSVEIEWELQKENSKRWNPEIQYTSNYNKSVNVDFTVDTNGVY
SEPRPIGTRYLTRNL*
SEQ ID NO: 44
>#1020_AAV.FL.linear_-_major_coat_protein_VP1_translation
CHC1020N_Adeno-Associated virus isolates in liver tumor, linear form
MAADGYLPDWLEDTLSEGIRQWWKLKPGPPPPKPAERHKDDSRGLVLPGYKYLGPFNGLDKGEPVNEADAAALEHDKAYD
RQLDSGDNPYLKYNHADAEFQERLKEDTSFGGNLGRAVFQAKKRVLEPLGLVEEPVKTAPGKKRPVEHSPVEPDSSSGTG
KAGQQPARKRLNFGQTGDADSVPDPQPLGQPPAAPSGLGSTTMATGSGAPMADNNEGADGVGNSSGNWHCDSQWLGDRVI
TTSTRTWALPTYNNHLYKQISSQSGASNDNHYFGYSTPWGYFDFNRFHCHFSPRDWQRLINNNWGFRPKRLNFKLFNIQV
KEVTQNDGTTTIANNLTSTVQVFTDSEYQLPYVLGSAHQGCLPPFPADVFMVPQYGYLTLNNGSQAVGRSSFYCLEYFPS
QMLRTGNNFQFSYTFEDVPFHSSYAHSQSLDRLMNPLIDQYLYYLNKTQSNSGTLQQSRLLFSQAGPTSMSLQAKNWLPG
PCYRQQRLSKQANDNNNSNFPWTAATKYHLNGRDSLVNPGPAMASHKDDEEKFFPMHGTLIFGKQGTNANDADLENVMIT
DEEEIRTTNPVATEQYGTVSNNLQNSNTGPTTGTVNHQGALPGMVWQDRDVYLQGPIWAKIPHTDGHFHPSPLMGGFGLK
HPPPQIMIKNTPVPANPPTNFSSAKFASFITQYSTGQVSVEIEWELQKENSKRWNPEIQYTSNYNKSVNVDFTVDTNGVY
SEPRPIGTRYLTRNL*
SEQ ID NO: 45
>#1158_AAV.FL.linear_-_major_coat_protein_VP1_translation
CHC1158N_Adeno-Associated virus isolates in liver tumor, linear form
MAADGYLPDWLEDTLSEGIRQWWKLKPGPPPPKPAERHKDDSRGLVLPGYKYLGPFNGLDKGEPVNEADAAALEHDKAYD
RQLDSGDNPYLKYNHADAEFQERLKEDTSFGGNLGRAVFQAKKRVLEPLGLVEEPVKTAPGKKRPVEHSPVEPDSSSGTG
KAGQQPARKRLNFGQTGDADSVPDPQPLGKPPAAPSGLGSTTMATGSGAPMADNNEGADGVGNSSGNWHCDSQWLGDRVI
TTSTRTWALPTYNNHLYKQISSQSGASNDNHYFGYSTPWGYFDFNRFHCHFSPRDWQRLINNNWGFRPKRLNFKLFNIQV
KEVTQNDGTTTIANNLTSTVQVFTDSEYQLPYVLGSAHQGCLPPFPADVFMVPQYGYLTLNNGSQAVGRSSFYCLEYFPS
QMLRTGNNFQFSYTFEDVPFHSSYAHSQSLDRLMNPLIDQYLYYLNKTQSNSGTLQQSRLLFSQAGPTSMSLQAKNWLPG
PCYRQQRLSKQANDNNNSNFPWTAATKYHLNGRDSLVNPGPAMASHKDDEEKFFPMHGTLIFGKQGTNANDADLDNVMIT
DEEEIRTTNPVATEQYGYVSNNLQNSNTGPTTGTVNHQGALPGMVWQDRDVYLQGPIWAKIPHTDGHFHPSPLMGGFGLK
HPPPQIMIKNTPVPANPPTNFSSSKFASFITQYSTGQVSVEIEWELQKENSKRWNPEIQYTSNYNKSVNVDFTVDTNGVY
SEPRPIGTRYLTRNL*
SEQ ID NO: 46
>#2107_AAV.FL.linear_-_major_coat_protein_VP1_translation
CHC2107N_Adeno-Associated virus isolates in liver tumor, linear form
MAADGYLPDWLEDTLSEGIRQWWKLKPGPPPPKPAERHKDDSRGLVLPGYKYLGPFNGLDKGEPVNEADAAALEHDKAYD
RQLDSGDNPYLKYNHADAEFQERLKEDTSFGGNLGRAVFQAKKRVLEPLGLVEEPVKTAPGKKRPVEHSPVEPDSSSGTG
KAGQQPARKRLNFGQTGDADSVPDPQPLGQPPAAPSGLGSTTMATGSGAPVADNNEGADGVGNSSGNWHCDSQWLGDRVI
TTSTRTWALPTYNNHLYKQISSQSGASNDNHYFGYSTPWGYFDFNRFHCHFSPRDWQRLINNNWGFRPKRLNFKLFNIQV
KEVTQNDGTTTIANNLTSTVQVFTDSEYQLPYVLGSAHQGCLPPFPADVFMVPQYGYLTLNNGSQAVGRSSFYCLEYFPS
QMLRTGNNFQFSYTFEDVPFHSSYAHSQSLDRLMNPLIDQYLYYLNKTQSNSGTLQQSRLLFSQAGPTSMSLQAKNWLPG
PCYRQQRLSKQANDNNNSNFPWTAATKYHLNGRDSLVNPGPAMASHKDDEEKFFPMHGTLIFGKQGTNANDADLDNVMIT
DEEEIRTTNPVATEQYGYVSNNLQNSNTGPTTGTVNHQGALPGMVWQDRDVYLQGPIWAKIPHTDGHFHPSPLMGGFGLK
HPPPQIMIKNTPVPANPPTNFSSAKFASFITQYSTGQVSVEIEWELQKENSKRWNPEIQYTSNYNKSVNVDFTVDTNGVY
SEPRPIGTRYLTRNL*
SEQ ID NO: 47
>#1570_AAV.FL.linear_-_major_coat_protein_VP1_translation
CHC1570N_Adeno-Associated virus isolates in liver tumor, linear form
MAADGYLPDWLEDTLSEGIRQWWKLKPGPPPPKPAERHKDDSRGLVLPGYKYLGPFNGLDKGEPVNEADAAALEHDKAYD
RQLDSGDNPYLKYNHADAEFQERLKEDTSFGGNLGRAVFQAKKRVLEPLGLVEEPVKTAPGKKRPVEHSPVEPDSSSGTG
KAGQQPARKRLNFGQTGDADSVPDPQPLGQPPAAPSGLGSTTMATGSGAPVADNNEGADGVGNSSGNWHCDSQWLGDRVI
TTSTRTWALPTYNNHLYKQISSQSGASNDNHYFGYSTPWGYFDFNRFHCHFSPRDWQRLINNNWGFRPKRLNFKLFNIQV
KEVTQNDGTTTIANNLTSTVQVFTDSEYQLPYVLGSAHQGCLPPFPADVFMVPQYGYLTLNNGSQAVGRSSFYCLEYFPS
QMLRTGNNFQFSYTFEDVPFHSSYAHSQSLDRLMNPLIDQYLYYLNKTQANSGTLQQSRLLFSQAGPTSMSLQAKNWLPG
PCYRQQRLSKQANDNNNSNFPWTAATKYHLNGRDSLVNPGPAMASHKDDEEEKFFPMHGTLIFGKQGTNANDADLDNVMI
TDEEEIRTTNPVATEQYXYVSNNLQNSNTGPTTGTVNHQGALPGMVWQDRDVYLQGPIWAKIPHTDGHFHPSPLMGGFGL
KHPPPQIMIKNTPVPSPLMGGFGLKHPPPQITQYSTGQVSVEIEWELQKENSKRWNPEIQYTSNYNKSVNVDFTVDTNGV
YSEPRPIGTRYLTRNL*
SEQ ID NO: 48
>#704_AAV.FL.linear_-_major_coat_protein_VP1_translation
CHC704N_Adeno-Associated virus isolates in liver tumor, linear form
MAADGYLPDWLEDTLSEGIRQWWKLKPGPPPPKPAERHKDDSRGLVLPGYKYLGPFNGLDKGEPVNEADAAALEHDKAYD
RQLDSGDNPYLKYNHADAEFQERLKEDTSFGGNLGRAVFQAKKRVLEPLGLVEEPVKTAPGKKRPVEHSPVEPDSSSGTG
KAGQQPARKRLNFGQTGDADSVPDPQPLGQPPAAPSGLGSTTMATGSGAPMADNNEGADGVGNSSGNWHCDSQWLGDRVI
TTSTRTWALPTYNNHLYKQISSQSGASNDNHYFGYSTPWGYFDFNRFHCHFSPRDWQRLINNNWGFRPKRLNFKLFNIQV
KEVTQNDGTTTIANNLTSTVQVFTDSEYQLPYVLGSAHQGCLPPFPADVFMVPQYGYLTLNNGSQAVGRSSFYCLEYFPS
QMLRTGNNFQFSYTFEDVPFHSSYAHSQSLDRLMNPLIDQYLYYLNKTQSNSGTLQQSRLLFSQAGPTSMSLQAKNWLPG
PCYRQQRLSKQANDNNNSNFPWTAATKYHLNGRDSLVNPGPAMASHKDDEEKFFPMHGTLIFGKQGTNANDADLDNVMIT
DEEEIRTTNPVATEQYGYVSNNLQNSNTGPTTGTVNHQGALPGMVWQDRDVYLQGPIWAKIPHTDGHFHPSPLMGGFGLK
HPPPQIMIKNTPVPANPPTNFSSAKFASFITQYSTGQVSVEIEWELQKENSKRWNPEIQYTSNYNKSVNVDFTVDTNGVY
SEPRPIGTRYLTRNL*
SEQ ID NO: 49
>#714_AAV.FL.linear_-_major_coat_protein_VP1_translation
CHC714N_Adeno-Associated virus isolates in liver tumor, linear form
MAADGYLPDWLEDTLSEGIRQWWKLKPGPPPPKPAERHKDDSRGLVLPGYKYLGPFNGLDKGEPVNEADAAALEHDKAYD
RQLDSGDNPYLKYNHADAEFQERLKEDTSFGGNLGRAVFQAKKRVLEPLGLVEEPVKTAPGKKRPVEHSPAEPDSSSGIG
KAGQQPARKRLNFGQTGDADSVPDPQPLGQPPAAPSGLGSTTMATGSGAPVADNNEGADGVGNSSGNWHCDSQWLGDRVI
TTSTRTWALPTYNNHLYKQISSQSGASNDNHYFGYSTPWGYFDFNRFHCHFSPRDWQRLINNNWGFRPKRLNFKLFNIQV
KEVTQNDGTTTIANNLTSTVQVFTDSEYQLPYVLGSAHQGCLPPFPADVFMVPQYGYLTLNNGSQAVGRSSFYCLEYFPS
QMLRTGNNFQFSYTFEDVPFHSSYAHSQSLDRLMNPLIDQYLYYLNKTQSNSGTLQQSRLLFSQAGPTSMSLQAKNWLPG
PCYRQQRLSKQANDNNNSNFPWTAATKYHLNGRDSLVNPGPAMASHKDDEEKFFPMHGTLIFGKQGTNANDADLDNVMIT
DEEEIRTTNPVATEQYGYVSNNLQNSNTGPTTGTVNHQGALPGMVWQDRDVYLQGPIWAKIPHTDGHFHPSPLMGGFGLK
HPPPQIMIKNTPVPANPPTNFSSAKFASFITQYSTGQVSVEIEWELQKENSKRWNPEIQYTSNYNKSVNVDFTVDTNGVY
SEPRPIGTRYLTRNL*
SEQ ID NO: 50
>#3086_AAV.FL.linear_-_major_coat_protein_VP1_translation
CHC3086N_Adeno-Associated virus isolates in liver tumor, linear form
MAADGYLPDWLEDTLSEGIRQWWKLKPGPPPPKPAERHKDNSRGLVLPGYKYLGPFNGLDKGEPVNEADAAALEHDKAYD
RQLDSGDNPYLKYNHADAEFQERLKEDTSFGGNLGRAVFQAKKRVLEPLGLVEEPVKTAPGKKRPVEHSPVEPDSSSGTG
KAGQQPAKKRLNFGQTGDADSVPDPQPLGQPPAAPSGLGSTTMATGSGAPMADNNEGADGVGNSSGNWHCDSQWLGDRVI
TTSTRTWALPTYNNHLYKQISSQSGASNDNHYFGYSTPWGYFDFNRFHCHFSPRDWQRLINNNWGFRPKRLNFKLFNIQV
KEVTQNDGTTTIANNLTSTVQVFTDSEYQLPYVLGSAHQGCLPPFPADVFMVPQYGYLTLNNGSQAVGRSSFYCLEYFPS
QMLRTGNNFQFSYTFEDVPFHSSYAHSQSLDRLMNPLIDQYLYYLNKTQSNSGTLQQSRLLFSQAGPTNMSLQAKNWLPG
PCYRQQRLSKQANDNNNSNFPWTAATKYHLNGRDSLVNPGPAMASHKDDEEKFFPMHGTLIFGKQGTNANDADLDNVMIT
DEEEIRTTNPVATEQYGYVSNNLQNSNTGPTTGTVNHQGALPGMVWQDRDVYLQGPIWAKIPHTDGHFHPSPLMGGFGLK
HPPPQIMIKNTPVPANPPTNFSSAKFASFITQYSTGQVSVEIEWELQKENSKRWNPEIQYTSNYNKSVNVDFTVDTNGVY
SEPRPIGTRYLTRNL*
SEQ ID NO: 51
>#3142_AAV.FL.linear_-_major_coat_protein_VP1_translation
CHC2143N_Adeno-Associated virus isolates in liver tumor, linear form
MAADGYLPDWLEDTLSEGIRQWWKLKPGPPPPKPAERHKDDSRGLVLPGYKYLGPFNGLDKGEPVNEADAAALEHDKAYD
RQLDSGDNPYLKYNHADAEFQERLKEDTSFGGNLGRAVFQAKKRVLEPLGLVEEPVKTAPGKKRPVEHSPAEPDSSSGTG
KAGNQPARKRLNFGQTGDADSVPDPQPIGQPPAAPTSLGSTTMATGSGAPMADNNEGADGVGNSSGNWHCDSQWLGDRVI
TTSTRTWALPTYNNHLYKQISSQSGASNDNHYFGYSTPWGYFDFNRFHCHFSPRDWQRLINNNWGFRPKRLNFKLFNIQV
KEVTQNDGTTTIANNLTSTVQVFTDSEYQLPYVLGSAHQGCLPPFPADVFMVPQYGYLTLNNGSQAVGRSSFYCLEYFPS
QMLRTGNNFQFSYTFEDVPFHSSYAHSQSLDRLMNPLIDQYLYYLNKTQSNSGTVQQSRLLFSQAGPTSMSLQAKNWLPG
PCYRQQRLSKQASDNNNSNFPWTAATKYHLNGRDSLVNPGPAMASHKDDEEKFFPMHGTLIFGKEGTTSNNADLEHVMIT
DEEEIRTTNPVATEQYGNVSNNLQNSNTGPTTENVNNQGALPGMVWQDRDVYLQGPIWAKIPHTDGHFHPSPLMGGFGLK
HPPPQIMIKNTPVPANPPTNFSAAKFASFITQYSTGQVSVEIEWELQKENSKRWNPEIQYTSNYNKSVNVDFTVDTNGVY
SEPRPIGTRYLTRNL*
SEQ ID NO: 52
>#1024_AAV.FL.linear_-_major_coat_protein_VP1_translation
CHC1024N_Adeno-Associated virus isolates in liver tumor, linear form
MAADGYLPDWLEDNLSEGIREWWALKPGAPQPKANQQHQDNARGLVLPGYKYLGPGNGLDKGEPVNAADAAALEHDKAYD
KQLKAGDNPYLKYNHADAEFQERLKEDTSFGGNLGRAVFQAKKRVLEPLGLVEEPVKTAPGKKRPVEHSPAEPDSSSGTG
KSGQQPARKRLNFGQTGDADSVPDPQPLGQPPAAPSGLGSTTMATGSGAPMADNNEGADGVGNSSGNWHCDSQWLGDRVI
TTSTRTWALPTYNNHLYKQISSQSGASNDNHYFGYSTPWGYFDFNRFHCHFSPRDWQRLINNNWGFRPKRLNFKLFNIQV
KEVTQNDGTTTIANNLTSTVQVFTDSEYQLPYVLGSAHQGCLPPFPADVFMVPQYGYLTLNNGSQAVGRSSFYCLEYFPS
QMLRTGNNFQFSYTFEDVPFHSSYAHSQSLDRLMNPLIDQYLYYLNRTQTASGTQQSRLLFSQAGPTSMSLQAKNWLPGP
CYRQQRLSKQANDNNNSNFPWTAATKYHLNGRDSLVNPGPAMASHKDDEEKFFPMHGTLIFGKEGTNATNADLDNVMITD
EEEIRTTNPVATEQYGYVSNNLQNSNTAATTETVNHQGALPGMVWQDRDVYLQGPIWAKIPHTDGHFHPSPLMGGFGLKH
PPPQIMIKNTPVPANPPTNFSAAKFASFITQYSTGQVSVEIEWELQKENSKRWNPEIQYTSNYNKSVNVDFTVDTNGVYS
EPRPIGTRYLTRNL*
SEQ ID NO: 53
>#790_AAV.FL.linear_-_major_coat_protein_VP1_translation
CHC790N_Adeno-Associated virus isolates in liver tumor, linear form
MAADGYLPDWLEDTLSEGIRQWWKLKPGPPPPKPAERHKDDSRGLVLPGYKYLGPFNGLDKGEPVNEADAAALEHDKAYD
RQLDSGDNPYLKYNHADAEFQERLKEDTSFGGNLGRAVFQAKKRVLEPLGLVEEPVKTAPGKKRPVEHSPVEPDSSSGTG
KAGNQPARKRLNFGQTGDADSVPDPQPLGQPPAAPSGLGSTTMATGSGAPVADNNEGADGVGNSSGNWHCDSQWLGDRVI
TTSTRTWALPTYNNHLYKQISSQSGASNDNHYFGYSTPWGYFDFNRFHCHFSPRDWQRLINNNWGFRPKRLNFKLFNIQV
KEVTQNDGTTTIANNLTSTVQVFTDSEYQLPYVLGSAHQGCLPPFPADVFMVPQYGYLTLNNGSQAVGRSSFYCLEYFPS
QMLRTGNNFQFSYTFEDVPFHSSYAHSQSLDRLMNPLIDQYLYYLNKTQSNSGTLQQSRLLFSQAGPTSMSLQAKNWLPG
PCYRQQRLSKQANDNNNSNFPWTAATKYHLNGRDSLVNPGPAMASHKDDEEKFFPMHGTLIFGKQGTNANDADLDNVMIT
DEEEIRTTNPVATEQYGYVSNNLQNSNTGPTTGTVNHQGALPGMVWQDRDVYLQGPIWAKIPHTDGHFHPSPLMGGFGLK
HPPPQIMIKNTPVPANPPTNFSSAKFASFITQYSTGQVSVEIEWELQKENSKRWNPEIQYTSNYNKSVNVDFTVDTNGVY
SEPRPIGTRYLTRNL*
SEQ ID NO: 54
>#976_AAV.FL.linear_-_major_coat_protein_VP1_translation
CHC976N_Adeno-Associated virus isolates in liver tumor, linear form
MAADGYLPDWLEDTLSEGIRQWWKLKPGPPPPKPAERHKDDSRGLVLPGYKYLGPFNGLDKGEPVNEADAAALEHDKAYD
RQLDSGDNPYLKYNHADAEFQERLKEDTSFGGNLGRAVFQAKKRVLEPLGLVEEPVKTAPGKKRPVEHSPVEPDSSSGTG
KAGQQPARKRLNFGQTGDADSVPDPQPLGQPPAAPSGLGSTTMATGSGAPVADNNEGADGVGNSSGNWHCDSQWLGDRVI
TTSTRTWALPTYNNHLYKQISSQSGASNDNHYFGYSTPWGYFDFNRFHCHFSPRDWQRLINNNWGFRPKRLNFKLFNIQV
KEVTQNDGTTTIANNLTSTVQVFTDSEYQLPYVLGSAHQGCLPPFPADVFMVPQYGYLTLNNGSQAVGRSSFYCLEYFPS
QMLRTGNNFQFSYTFEDVPFHSSYAHSQSLDRLMNPLIDQYLYYLNKTQSNSGTLQQSRLLFSQAGPTSMSLQAKNWLPG
PCYRQQRLSKQANDNNNSNFPWTAATKYHLNGRDSLVNPGPAMASHKDDEEKFFPMHGTLIFGKQGTNANDADLDNVMIT
DEEEIRTTNPVATEQYGYVSNNLQNSNTGPTTGTVNHQGALPGMVWQDRDVYLQGPIWAKIPHTDGHFHPSPLMGGFGLK
HPPPQIMIKNTPVPANPPTNFSSAKFASFITQYSTGQVSVEIEWELQKENSKRWNPEIQYTSNYNKSVNVDFTVDTNGVY
SEPRPIGTRYLTRNL*
SEQ ID NO: 55
>#1286_AAV.FL.linear_-_major_coat_protein_VP1_translation
CHC1286N_Adeno-Associated virus isolates in liver tumor, linear form
MAADGYLPDWLEDTLSEGIRQWWKLKPGPPPPKPAERHKDDSRGLVLPGYKYLGPFNGLDKGEPVNEADAAALEHDKAYD
RQLDSGDNPYLKYNHADAEFQERLKEDTSFGGNLGRAVFQAKKRVLEPLGLVEEPVKTAPGKKRPVEHSPVEPDSSSGTG
KAGQQPARKRLNFGQTGDADSVPDPQPLGQPPAAPSGLGSTTMATGSGAPVADNNEGADGVGNSSGNWHCDSQWLGDRVI
TTSTRTWALPTYNNHLYKQISSQSGASNDNHYFGYSTPWGYFDFNRFHCHFSPRDWQRLINNNWGFRPKRLNFKLFNIQV
KEVTQNDGTTTIANNLTSTVQVFTDSEYQLPYVLGSAHQGCLPPFPADVFMVPQYGYLTLNNGSQAVGRSSFYCLEYFPS
QMLRTGNNFQFSYTFEDVPFHSSYAHSQSLDRLMNPLIDQYLYYLNKTQSNSGTLQQSRLLFSQAGPTSMSLQAKNWLPG
PCYRQQRLSKQANDNNNSNFPWTAATKYHLNGRDSLVNPGPAMASHKDDEEKFFPMHGTLIFGKQGTNANDADLDNVMIT
DEEEIRTTNPVATEQYGYVSNNLQNSNTGPTTGTVNHQGALPGMVWQDRDVYLQGPIWAKIPHTDGHFHPSPLMGGFGLK
HPPPQIMIKNTPVPANPPTNFSSAKFASFITQYSTGQVSVEIEWELQKENSKRWNPEIQYTSNYNKSVNVDFTVDTNGVY
SEPRPIGTRYLTRNL*
SEQ ID NO: 56
>#163_AAV.FL.linear_-_major_coat_protein_VP1_translation
CHC163N_Adeno-Associated virus isolates in liver tumor, linear form
MAADGYLPDWLEDTLSEGIRQWWKLKPGPPPPKPAERHKDDSRGLVLPGYKYLGPFNGLDKGEPVNEADAAALEHDKAYD
RQLDSGDNPYLKYNHADAEFQERLKEDTSFGGNLGRAVFQAKKRVLEPLGLVEEPVKTAPGKKRPVEHSPVEPDSSSGTG
KAGQQPARKRLNFGQTGDADSVPDPQPLGQPPAAPSGLGSTTMATGSGAPVADNNEGADGVGNSSGNWHCDSQWLGDRVI
TTSTRTWALPTYNNHLYKQISSQSGASNDNHYFGYSTPWGYFDFNRFHCHFSPRDWQRLINNNWGFRPKKLNFKLFNIQV
KEVTQNDGTTTIANNLTSTVQVFTDSEYQLPYVLGSAHQGCLPPFPADVFMVPQYGYLTLNNGSQAVGRSSFYCLEYFPS
QMLRTGNNFQFSYTFEDVPFHSSYAHSQSLDRLMNPLIDQYLYYLNKTQSNSGTLQQSRLLFSQAGPTSMSLQAKNWLPG
PCYRQQRLSKQANDNNNSNFPWTAATKYHLNGRDSLVNPGPAMASHKDDEEKFFPMHGTLIFGKQGTNANDADLDNVMIT
DEEEIRTTNPVATEQYGYVSNNLQNSNTGPTTGTVNHQGALPGMVWQDRDVYLQGPIWAKIPHTDGHFHPSPLMGGFGLK
HPPPQIMIKNTPVPANPPTNFSSAKFASFITQYSTGQVSVEIEWELQKENSKRWNPEIQYTSNYNKSVNVDFTVDTNGVY
SEPRPIGTRYLTRNL*
SEQ ID NO : 57
>#685_AAV.FL.linear_-_major_coat_protein_VP1_translation
CHC685N_Adeno-Associated virus isolates in liver tumor, linear form
MAADGYLPDWLEDTLSEGIRQWWKLKPGPPPPKPAERHKDDSRGLVLPGYKYLGPFNGLDKGEPVNEADAAALEHDKAYD
RQLDSGDNPYLKYNHADAEFQERLKEDTSFGGNLGRAVFQAKKRVLEPLGLVEEPVKTAPGKKRPVEHSPAEPDSSSGTG
KAGQQPARKRLNFGQTGDADSVPDPQPLGQPPAAPSGLGSTTMATGSGAPMADNNEGADGVGNSSGNWHCDSQWLGNRVI
TTSTRTWALPTYNNHLYKQISSQSGASNDNHYFGYSTPWGYFDFNRFHCHFSPRDWQRLINNNWGFRPKRLNFKLFNIQV
KEVTQNDGTTTIANNLTSTVQVFTDSEYQLPYVLGSAHQGCLPPFPADVFMVPQYGYLTLNNGSQAVGRSSFYCLEYFPS
QMLRTGNNFQFSYTFEDVPFHSSYAHSQSLDRLMNPLIDQYLYYLNKTQSNSGTLQQSRLLFSQAGPTSMSLQAKNWLPG
PCYRQQRLSKQANDNNNSNFPWTAATKYHLNGRDSLVNPGPAMASHKDDEEKFFPMHGTLIFGKQGTNANDADLDNVMIT
DEEEIRTTNPVATEQYGYVSNNLQNSNTGPTTGTVNHQGALPGMVWQDRDVYLQGPIWAKIPHTDGHFHPSPLMGGFGLK
HPPPQIMIKNTPVPANPPTNFSSAKFASFITQYSTGQVSVEIEWELQKENSKRWNPEIQYTSNYNKSVNVDFTVDTNGVY
SEPRPIGTRYLTRNL*
SEQ ID NO : 58
>#442_AAV.FL.linear_-_major_coat_protein_VP1_translation
CHC442N_Adeno-Associated virus isolates in liver tumor, linear form
MAADGYLPDWLEDTLSEGIRQWWKLKPGPPPPKPAERHKDDSRGLVLPGYKYLGPFNGLDKGEPVNEADAAALEHDKAYD
RQLDSGDNPYLKYNHADAEFQERLKEDTSFGGNLGRAVFQAKKRVLEPLGLVEEPVKTAPGKKRPVEHSPVEPDSSSGTG
KAGQQPARKRLNFGQTGDADSVPDPQPLGQPPAAPSGLGSTTMATGSGAPMADNNEGADGVGNSSGNWHCDSQWLGDRVI
TTSTRTWALPTYNNHLYKQISSQSGASNDNHYFGYSTPWGYFDFNRFHCHFSPRDWQRLINNNWGFRPKRLNFKLFNIQV
KEVTQNDGTTTIANNLTSTVQVFTDSEYQLPYVLGSAHQGCLPPFPADVFMVPQYGYLTLNNGSQAVGRSSFYCLEYFPS
QMLRTGNNFQFSYTFEDVPFHSSYAHSQSLDRLMNPLIDQYLYYLNKTQSNSGTLQQSRLLFSQAGPTSMSLQAKNWLPG
PCYRQQRLSKQANDNNNSNFPWTAATKYHLNGRDSLVNPGPAMASHKDDEEKFFPMHGTLIFGKQGTGRDNADLDNVMIT
DEEEIRTTNPVATEQYGYVSNNLQNSNTGPTTGTVNHQGALPGMVWQDRDVYLQGPIWAKIPHTDGHFHPSPLMGGFGLK
HPPPQIMIKNTPVPANPPTNFSSAKFASFITQYSTGQVSVEIEWELQKENSKRWNPEIQYTSNYNKSVNVDFTVDTNGVY
SEPRPIGTRYLTRNL*
SEQ ID NO : 59
>#2320_AAV.FL.linear_-_major_coat_protein_VP1_translation
CHC2320N_Adeno-Associated virus isolates in liver tumor, linear form
MAADGYLPDWLEDTLSEGIRQWWKLKPGPPPPKPAERHKDDSRGLVLPGYKYLGPFNGLDKGEPVNEADAAALEHDKAYD
RQLDSGDNPYLKYNHADAEFQERLKEDTSFGGNLGRAVFQAKKRVLETLGLVEEHVKTAPGKKRAVEHAHVEPDSSSGTG
KAGQQPARKRLNFGQTGDADSVPDPQPLGQPPAAPXGLGSTTMASGSGAPMADNNEGADGVGNSSGNWHCDSQWLGDRVI
TTSTRTWALPTYNNHLYKQISSQSGASNDNHYFGYSTPWGYFDFNRFHCHFSPRDWQRLINNNWGFRPKRLNFKLFNIQV
KEVTQNDGTTTIANNLTSTVQVFTDSEYQLPYVLGSAHQGCLPPFPADVFMVPQYGYLTLNNGSQAVGRSSFYCLEYFPS
QMLRTGNNFQFSYTFEDVPFHSSYAHSQSLDRLMNPLIDQYLYYLNKTQSNSGTLQQSRLLFSQAGPTSMSLQAKNWLPG
PCYRQQRLSKQATDNNNSEFPWTAATKYHLNGRDSLVNPGPAMASHKDDEEKFFPMHGTLIFGKQGTKCNDADLDNVMIT
DEEEIRTTNPVATEQYGYVSNNLQNSNTGPTTGTVNHQGALPGMVWQDRDVYLQGPIWAKIPHTDGHFHPSPLMGGFGLK
HPPPQIMIKNTPVPANPPTNFSSAKFASFITQYSTGQVSVEIEWELQKENSKRWNPEIQYTSNYNKSVNVDFTVDTNGVY
SEPRPIGTRYLTRNL*
SEQ ID NO : 60
>#1055_AAV.linear_-_major_coat_protein_VP1_translation
CHC1055N_Adeno-Associated virus isolates in liver tumor, linear form
MAADGYLPDWLEDTLSEGIRQWWKLKPGPPPPKPAERHKDDSRGLVLPGYKYLGPFNGLDKGEPVNEADAAALEHDKAYD
RQLDSGDNPYLKYNHADAEFQERLKEDTSFGGNLGRAVFQAKKRVLEPLGLVEEPVKTAPGKKRPVEHSPVEPDSSSGTG
KAGQQPARKRLNFGQTGPYASVPDPQPLGQPPAAPSGLGTNTMATGSGAPMADNNEGADGVGNSSGNWHCDSTWMGDRVI
TTSTRTWALPTYNNHLYKQISSQSGASNDNHYFGYSTPWGYFDFNRFHCHFSPRDWQRLINNNWGFRPKRLNFKLFNIQV
KEVTQNDGTTTIANNLTSTVQVFTDSEYQLPYVLGSAHQGCLPPFPADVFMVPQYGYLTLNNGSQAVGRSSFYCLEYFPS
QMLRTGNNFTFSYTFEDVPFHSSYAHSQSLDRLMNPLIDQYLYYLSRTNTPSGTTTQSRLQFSQAGASDIRDQSRNWLPG
PCYRQQRVSKTAADNNNSEYSWTGATKYHLNGRDSLVNPGPAMASHKDDEEKFFPQSGVLIFGKQGSEKTNVDIEKVMIT
DEEEIRTTNPVATEQYGAVSTNLQSGNTQAATSDVNTQGVLPGMVWQDRDVYLQGPIWAKIPHTDGHFHPSPLMGGFGLK
HPPPQILIKNTPVPANPSTTFSAAKFASFITQYSTGQVSVEIEWELQKENSKRWNPEIQYTSNYNKSVNVDFTVDTNGVY
SEPRPIGTRYLTRNL*
SEQ ID NO: 61
>#M258_AAV.linear_-_major_coat_protein_VP1_translation
BCM258N_Adeno-Associated virus isolates in liver tumor, linear form
MAADGYLPDWLEDTLSEGIRQWWKLKPGPPPPKPAERHKDDSRGLVLPGYKYLGPFNGLDKGEPVNEADAAALEHDKAYD
RQLDSGDNPYLKYNHADAEFQERLKEDTSFGGNLGRAVFQAKKRVLEPLGLVEEPVKTAPGKKRPVEHSPAEPDSSSGTG
KAGNQPARKRLNFGQTGDADSVPDPQPLGEPPAAPTSLGSTTMASGGGAPVADNNEGADGVGNSSGKLALRFPMAGRQSH
YHQHPNLGPAHLQQPSVQANFQPIRSQQRQPLILAHCNPWGYFDFNRFHCHFSPRDWQRLINNNWGFRPKRLNFKLFNIQ
VKEVTQNDGTTTIANNLTSTVQVFTDSEYQIPYVLGSAHQGCLPPFPADVFMVPQYGYLTLNNGSQAVGRSSFYCLEYFP
SQMLRTGNNFQFSYTFEDVPFHSSYAHSQSLDRLMNPLIDQYLYYLNKTQSASGTVQQSRLLFSQAGPTSMSLQAKNWLP
GPCYRQQRLSKQANENNNSNFPWTAATKYHLNGRDSLVNPGPAMASHKDDEEKFFPMHGTLIFGKQGTGRDNADLDNVMI
TDEEEIRTTNPVATEQYGYVSNNLQNSNTAPSTGTVNHQGALPGMVWQDRDVYLQGPIWAKIPHTDGHFHPSPLMGGFGL
KHPPPQIMIKNTPVPANPPTNFSAAKFASFITQYSTGQVSVEIEWELQKENSKRWNPEIQYTSNYNKSVNVDFTVDTNGV
YSEPRPIGTRYLTRNL*
SEQ ID NO: 121
>consensus_AAV2
MAADGYLPDW LEDTLSEGIR QWWKLKPGPP PPKPAERHkD DSRGLVLPGY KYLGPFNGLD
KGEPVNEADA AALEHDKAYD RQLDSGDNPY LKYNHADAEF QeRLKEDTSF GGNLGRAVFQ
AKKRVLEPLG LVEEPVKTAP GKKRPVEHSP vEPDSSSGTG KaGqQPARKR LnfgQTGDAD
SVPDPQPLGq PPAAPsgLGt nTMAtGsGAP mADNNEGADG VGNSSGNWHC DStWmGDRVI
TTSTRTWALP TYNNHLYKQI SSQSGASNDN HYFGYSTPWG YFDFNRFHCH FSPRDWQRLI
NNNWGFRPKR LNFKLFNIQV KEVTQNDGTT TIANNLTSTV QVFTDSEYQL PYVLGSAHQG
ClPPFPADVF MVPQYGYLTL NNGSQAVGRS SFYCLEYFPS QMLRTGNNFT FSYTFEDVPF
HSSYAHSQSL DRLMNPLIDQ YLYYLSrTNT PSGTTTqSRL QFSQAGASDI RDQSRNWLPG
PCYRQQRVSK TaADNnNSeY SWTGATKYHL NGRDSLVNPG PAMASHKDDE EKfFPQSGVL
IFGKQgSeKT NVDIEKVMIT DEEEIRTTNP VATEQYGsVS TNLQSGNTQA ATsDVNtQGV
LPGMVWQDRD VYLQGPIWAK IPHTDGHFHP SPLMGGFGLK HPPPQIlIKN TPVPANPsTt
FSaAKFASFI TQYSTGQVSV EIEWELQKEN SKRWNPEIQY TSNYNKSVNV DFTVDTNGVY
SEPRPIGTRY LTRNL

[0032] A further object of the present invention relates to a variant VP2 capsid protein that consists of the amino acid sequence that ranges from the amino acid at position 138 to the last amino acid in SEQ ID NO:2 comprising at least one mutation selected from the group consisting of V151A, Q164N; T200S; N201T; M211V; T233Q; M235L; T410Q; S446N; R447K; N449Q; T450S; P451N; T455L; T456Q; Q461L; A467P; S468T; D469S; I470M; R471S; D472L; S474A; R475K; V488L; T491Q; S492A; A493N; E499N; Y500F; S501P; G504A; Q536M; S537H; V539T; S547T; E548N; K549A; T550N; N551D; V552A; I554L; E555D; K556N; S578Y; T581N; R585N; R585S; G586S; R588T; Q589G; A590P; A591T; A593S; A593G; D594T; T597H; V600A; L647M; S658P; T660N; and A663S

[0033] In some embodiments, the variant VP2 capsid protein of the present invention has an amino acid sequence that ranges from the amino acid at position 138 to the last amino acid in SEQ ID NO:3 to SEQ ID NO:61.

[0034] A further object of the present invention relates to a variant VP2 capsid protein of the present invention has an amino acid sequence that ranges from the amino acid at position 138 to the last amino acid in SEQ ID NO:26 (i.e. capsid #3013), SEQ ID NO:9 (i.e. capsid #2087), SEQ ID NO: 20 (i.e. capsid #1449), SEQ ID NO: 10 (i.e. capsid #2206), SEQ ID NO: 12 (i.e. capsid #1534), SEQ ID NO: 56 (i.e. capsid #163), SEQ ID NO: 23 (i.e. capsid #1343), SEQ ID NO: 53 (i.e. capsid #790), SEQ ID NO: 6 (i.e. capsid #1017), SEQ ID NO: 11 (i.e. capsid #877), SEQ ID NO:8 (i.e. capsid #1273), SEQ ID NO: 3 (i.e. capsid #2497), SEQ ID NO: 60 (i.e. capsid #1055), SEQ ID NO:14 (i.e. capsid #1919), SEQ ID NO: 4, SEQ ID NO:5, SEQ ID NO:7, SEQ ID NO:13, SEQ ID NO:15 to SEQ ID NO:19, SEQ ID NO:21, SEQ ID NO:22, SEQ ID NO:24, SEQ ID NO:25, SEQ ID NO:27 to SEQ ID NO:55, SEQ ID NO:57 to SEQ ID NO:59, SEQ ID NO:61.

[0035] A further object of the present invention relates to a variant VP3 capsid protein that consists of the amino acid sequence that ranges from the amino acid at position 203 to the last amino acid in SEQ ID NO:2 comprising at least one mutation selected from the group consisting of M211V; T233Q; M235L; T410Q; S446N; R447K; N449Q; T450S; P451N; T455L; T456Q; Q461L; A467P; S468T; D469S; I470M; R471S; D472L; S474A; R475K; V488L; T491Q; S492A; A493N; E499N; Y500F; S501P; G504A; Q536M; S537H; V539T; S547T; E548N; K549A; T550N; N551D; V552A; I554L; E555D; K556N; S578Y; T581N; R585N; R585S; G586S; R588T; Q589G; A590P; A591T; A593S; A593G; D594T; T597H; V600A; L647M; S658P; T660N; and A663S

[0036] In some embodiments, the variant VP3 capsid protein of the present invention has an amino acid sequence that ranges from the amino acid at position 203 to the last amino acid in SEQ ID NO:3 to SEQ ID NO:61.

[0037] A further object of the present invention relates to a variant VP3 capsid protein of the present invention has an amino acid sequence that ranges from the amino acid at position 203 to the last amino acid in SEQ ID NO:26 (i.e. capsid #3013), SEQ ID NO:9 (i.e. capsid #2087), SEQ ID NO: 20 (i.e. capsid #1449), SEQ ID NO: 10 (i.e. capsid #2206), SEQ ID NO: 12 (i.e. capsid #1534), SEQ ID NO: 56 (i.e. capsid #163), SEQ ID NO: 23 (i.e. capsid #1343), SEQ ID NO: 53 (i.e. capsid #790), SEQ ID NO: 6 (i.e. capsid #1017), SEQ ID NO: 11 (i.e. capsid #877), SEQ ID NO:8 (i.e. capsid #1273), SEQ ID NO: 3 (i.e. capsid #2497), SEQ ID NO: 60 (i.e. capsid #1055), SEQ ID NO:14 (i.e. capsid #1919), SEQ ID NO: 4, SEQ ID NO:5, SEQ ID NO:7, SEQ ID NO:13, SEQ ID NO:15 to SEQ ID NO:19, SEQ ID NO:21, SEQ ID NO:22, SEQ ID NO:24, SEQ ID NO:25, SEQ ID NO:27 to SEQ ID NO:55, SEQ ID NO:57 to SEQ ID NO:59, SEQ ID NO:61.

[0038] Polynucleotides that Encodes for the Variant Capsid Proteins:

[0039] A further object of the present invention relates to a polynucleotide that encodes for a variant capsid protein of the present invention.

[0040] In some embodiments, the polynucleotide of the present invention that encodes for a variant VP1 capsid of the present invention consists of the nucleic sequence that ranges from the nucleotide at position 2203 to the nucleotide at position 4410 in SEQ ID NO:1 and that comprises at least one mutation selected from Table 1.

[0041] In some embodiments, the polynucleotide of the present invention that encodes for a variant VP1 capsid of the present invention consists of the nucleic sequence that ranges from the nucleotide at position 2203 to the nucleotide at position 4410 in SEQ ID NO:1 and that comprises at least one mutation selected from the group consisting of 2433A>G; 2511C>T; 2654T>C; 2685G>A; 2692CAG>AAC; 2721T>C; 2745A>C; 2794C>T; 2800A>T; 2804A>C; 2808G->A; 2833A>G; 2853C>T; 2859C>T; 2877G>A; 2899AC>CA; 2905A>C; 2946C>T; 2967C>T; 2970C>G; 2976A>G; 2979A>G; 2982T>C; 3003G>A; 3012T>C; 3036T>C; 3123A>G; 3129G>A; 3165A>G; 3297C>T; 3303A>G; 3318G>C; 3360A>G; 3375A>C; 3411G>T; 3417C>T; 3430ACC>CAG; 3444T>C; 3450G>A; 3490C>T; 3495C>T; 3498T>G; 3501C>G; 3513C>G; 3534C>T; 3535T>C; 3539G>A; 3542GA>AG; 3547AAC>CAA; 3550ACT>TCA; 3553CCA>AAT; 3558T>C; 3564C>T; 3565ACC>CTT; 3568AC>CA; 3576A>C; 3576A>T; 3577A>C; 3582T>A; 3584A>T; 3589TC>AG; 3594G>A; 3597C>T3601GCG>CCC 3605GT>CC 3607GA>AG 3612T>G 3613CGG>TCT 3616GAC>CTT 3621G>A 3622T>G 3626GG>AA 3636T>G 3645C>T 3648T>C 3652CGC>AGA 3663A>T 3664GTA>CTG 3672ACA>CAG 3676TCT>GCA 3679GCG>AAC 3684T>C 3696T>C 3697GAA>AAC 3701AC>TT 3703TCG>CCC 3713GA>CG 3720C>A 3726C>T 3729C>T 3732C>A 3739AGA>CGG 3747T>G 3748C>T 3753G>T 3759G>A 3762C>A 3765G>A 3768C>T 3774A>C 3783G>A 3804T>C 3807T>C 3808CA>AT 3811AGC>CAT 3816G>A 3817GTT>ACC 3822C>G 3825C>A 3831G>A 3834G>A 3840C>A 3841T>A 3844GAG>AAT 3847AAA>GCT 3851CA>AC 3853AAT>GAC 3857T>C 3861C>T 3862ATT>TTG 3867A>C 3870>T 3885C>T 3891G>A 3898AGG>CGC 3903A>C 3930T>C 3933T>A 3935C>A 3939A>G 3942T>A 3944CC>AT 3948C>T 3949CTC>TTG 3954G>A 3956GA>AC 3957A>C 3958GGC>TCA 3963C>T 3965G>C 3967CAA>GGT 3970G>C 3973G>A 3978C>T 3979G>T 3980C>G 3982GA>AC 3990C>T 3991ACA>CAC 3999C>A 4001TT>CG 4003CTT>TTA 4008A>T 4011C>T 4017C>G 4026C>T 4027A>C 4032T>C 4041T>G 4047G>A 4053C>T 4059A>C 4068A>T 4074G>C 4077C>T 4083T>C 4089C>T 4092C>T 4098C>A 4101C>G 4107T>C 4110A>T 4113C>T 4116A>G 4119T>G 4128T>G 4134A>G 4140T>C 4141CTC>ATG 4149G>A 4155C>T 4158G>C 4161A>T 4164T>A 4167G>C 4174TCG>CCC 4179C>A 4181C>A 4189GCG>TCT 4194A>C 4206C>T 4221C>T 4230A>G 4269A>G 4287T>C 4293A>G 4296T>C 4320G>A and 4356C>T.

[0042] In some embodiments, the polynucleotide of the present invention that encodes for a variant VP1 capsid of the present invention consists the nucleic sequence that ranges from the nucleotide at position 2203 to the nucleotide at position 4410 in SEQ ID NO: 62; 63; 64; 65; 66; 67; 68; 69; 70; 71; 72; 73; 74; 75; 76; 77; 78; 79; 80; 81; 82; 83; 84; 85; 86; 87; 88; 89; 90; 91; 92; 93; 94; 95; 96; 97; 98; 99; 100; 101; 102; 103; 104; 105; 106; 107; 108; 109; 110; 111; 112; 113; 114; 115; 116; 117; or 118.

[0043] In some embodiments, the polynucleotide of the present invention that encodes for a variant VP1 capsid of the present invention consists the nucleic sequence that ranges from the nucleotide at position 2203 to the nucleotide at position 4410 in SEQ ID NO: 85 (i.e. capsid #3013), SEQ ID NO: 68 (i.e. capsid #2087), SEQ ID NO: 79 (i.e. capsid #1449), SEQ ID NO: 69 (i.e. capsid #2206), SEQ ID NO: 71 (i.e. capsid #1534), SEQ ID NO: 115 (i.e. capsid #163), SEQ ID NO: 82 (i.e. capsid #1343), SEQ ID NO: 112 (i.e. capsid #790), SEQ ID NO:65 (i.e. capsid #1017), SEQ ID NO: 70 (i.e. capsid #877), SEQ ID NO: 67 (i.e. capsid #1273), SEQ ID NO: 62 (i.e. capsid #2497); SEQ ID NO: 119 (i.e. capsid #1055); SEQ ID NO: 73 (i.e. capsid #1919), SEQ ID NO:63, SEQ ID NO:64; SEQ ID NO:66, SEQ ID NO: 72, SEQ ID NO: 74, SEQ ID NO: 75, SEQ ID NO: 76, SEQ ID NO: 77, SEQ ID NO: 78, SEQ ID NO:80, SEQ ID NO:81, SEQ ID NO:83, SEQ ID NO:84, SEQ ID NO:86, SEQ ID NO:87; SEQ ID NO:88; SEQ ID NO:89; SEQ ID NO:90; SEQ ID NO: 91; SEQ ID NO:92; SEQ ID NO:93; SEQ ID NO:94; SEQ ID NO:95; SEQ ID NO:96; SEQ ID NO:97; SEQ ID NO:98, SEQ ID NO: 99; SEQ ID NO:100; SEQ ID NO:101; SEQ ID NO:102; SEQ ID NO:103, SEQ ID NO:104; SEQ ID NO:105, SEQ ID NO: 106; SEQ ID NO:107, SEQ ID NO:108, SEQ ID NO:109, SEQ ID NO: 110; SEQ ID NO:111, SEQ ID NO:113; SEQ ID NO:114; SEQ ID NO:116, SEQ ID NO: 117; SEQ ID NO:118 or SEQ ID NO:120.

[0044] In some embodiments, the polynucleotide of the present invention that encodes for a variant VP2 capsid of the present invention consists of the nucleic sequence that ranges from the nucleotide at position 2614 to the nucleotide at position 4410 in SEQ ID NO:1 and that comprises at least one mutation selected from Table 1.

[0045] In some embodiments, the polynucleotide of the present invention that encodes for a variant VP2 capsid of the present invention consists of the nucleic sequence that ranges from the nucleotide at position 2614 to the nucleotide at position 4410 in SEQ ID NO:1 and that comprises at least one mutation selected from the group consisting of 2654T>C; 2685G>A; 2692CAG>AAC; 2721T>C; 2745A>C; 2794C>T; 2800A>T; 2804A>C; 2808G->A; 2833A>G; 2853C>T; 2859C>T; 2877G>A; 2899AC>CA; 2905A>C; 2946C>T; 2967C>T; 2970C>G; 2976A>G; 2979A>G; 2982T>C; 3003G>A; 3012T>C; 3036T>C; 3123A>G; 3129G>A; 3165A>G; 3297C>T; 3303A>G; 3318G>C; 3360A>G; 3375A>C; 3411G>T; 3417C>T; 3430ACC>CAG; 3444T>C; 3450G>A; 3490C>T; 3495C>T; 3498T>G; 3501C>G; 3513C>G; 3534C>T; 3535T>C; 3539G>A; 3542GA>AG; 3547AAC>CAA; 3550ACT>TCA; 3553CCA>AAT; 3558T>C; 3564C>T; 3565ACC>CTT; 3568AC>CA; 3576A>C; 3576A>T; 3577A>C; 3582T>A; 3584A>T; 3589TC>AG; 3594G>A; 3597C>T3601GCG>CCC 3605GT>CC 3607GA>AG 3612T>G 3613CGG>TCT 3616GAC>CTT 3621G>A 3622T>G 3626GG>AA 3636T>G 3645C>T 3648T>C 3652CGC>AGA 3663A>T 3664GTA>CTG 3672ACA>CAG 3676TCT>GCA 3679GCG>AAC 3684T>C 3696T>C 3697GAA>AAC 3701AC>TT 3703TCG>CCC 3713GA>CG 3720C>A 3726C>T 3729C>T 3732C>A 3739AGA>CGG 3747T>G 3748C>T 3753G>T 3759G>A 3762C>A 3765G>A 3768C>T 3774A>C 3783G>A 3804T>C 3807T>C 3808CA>AT 3811AGC>CAT 3816G>A 3817GTT>ACC 3822C>G 3825C>A 3831G>A 3834G>A 3840C>A 3841T>A 3844GAG>AAT 3847AAA>GCT 3851CA>AC 3853AAT>GAC 3857T>C 3861C>T 3862ATT>TTG 3867A>C 3870>T 3885C>T 3891G>A 3898AGG>CGC 3903A>C 3930T>C 3933T>A 3935C>A 3939A>G 3942T>A 3944CC>AT 3948C>T 3949CTC>TTG 3954G>A 3956GA>AC 3957A>C 3958GGC>TCA 3963C>T 3965G>C 3967CAA>GGT 3970G>C 3973G>A 3978C>T 3979G>T 3980C>G 3982GA>AC 3990C>T 3991ACA>CAC 3999C>A 4001TT>CG 4003CTT>TTA 4008A>T 4011C>T 4017C>G 4026C>T 4027A>C 4032T>C 4041T>G 4047G>A 4053C>T 4059A>C 4068A>T 4074G>C 4077C>T 4083T>C 4089C>T 4092C>T 4098C>A 4101C>G 4107T>C 4110A>T 4113C>T 4116A>G 4119T>G 4128T>G 4134A>G 4140T>C 4141CTC>ATG 4149G>A 4155C>T 4158G>C 4161A>T 4164T>A 4167G>C 4174TCG>CCC 4179C>A 4181C>A 4189GCG>TCT 4194A>C 4206C>T 4221C>T 4230A>G 4269A>G 4287T>C 4293A>G 4296T>C 4320G>A and 4356C>T.

[0046] In some embodiments, the polynucleotide of the present invention that encodes for a variant VP2 capsid of the present invention consists of the nucleic sequence that ranges from the nucleotide at position 2614 to the nucleotide at position 4410 in SEQ ID NO: 62; 63; 64; 65; 66; 67; 68; 69; 70; 71; 72; 73; 74; 75; 76; 77; 78; 79; 80; 81; 82; 83; 84; 85; 86; 87; 88; 89; 90; 91; 92; 93; 94; 95; 96; 97; 98; 99; 100; 101; 102; 103; 104; 105; 106; 107; 108; 109; 110; 111; 112; 113; 114; 115; 116; 117; or 118.

[0047] In some embodiments, the polynucleotide of the present invention that encodes for a variant VP2 capsid of the present invention consists of the nucleic sequence that ranges from the nucleotide at position 2614 to the nucleotide at position 4410 in SEQ ID NO: 85 (i.e. capsid #3013), SEQ ID NO: 68 (i.e. capsid #2087), SEQ ID NO: 79 (i.e. capsid #1449), SEQ ID NO: 69 (i.e. capsid #2206), SEQ ID NO: 71 (i.e. capsid #1534), SEQ ID NO: 115 (i.e. capsid #163), SEQ ID NO: 82 (i.e. capsid #1343), SEQ ID NO: 112 (i.e. capsid #790), SEQ ID NO:65 (i.e. capsid #1017), SEQ ID NO: 70 (i.e. capsid #877), SEQ ID NO: 67 (i.e. capsid #1273), SEQ ID NO: 62 (i.e. capsid #2497); SEQ ID NO: 119 (i.e. capsid #1055); SEQ ID NO: 73 (i.e. capsid #1919), SEQ ID NO:63, SEQ ID NO:64; SEQ ID NO:66, SEQ ID NO: 72, SEQ ID NO: 74, SEQ ID NO: 75, SEQ ID NO: 76, SEQ ID NO: 77, SEQ ID NO: 78, SEQ ID NO:80, SEQ ID NO:81, SEQ ID NO:83, SEQ ID NO:84, SEQ ID NO:86, SEQ ID NO:87; SEQ ID NO:88; SEQ ID NO:89; SEQ ID NO:90; SEQ ID NO: 91; SEQ ID NO:92; SEQ ID NO:93; SEQ ID NO:94; SEQ ID NO:95; SEQ ID NO:96; SEQ ID NO:97; SEQ ID NO:98, SEQ ID NO: 99; SEQ ID NO:100; SEQ ID NO:101; SEQ ID NO:102; SEQ ID NO:103, SEQ ID NO:104; SEQ ID NO:105, SEQ ID NO: 106; SEQ ID NO:107, SEQ ID NO:108, SEQ ID NO:109, SEQ ID NO: 110; SEQ ID NO:111, SEQ ID NO:113; SEQ ID NO:114; SEQ ID NO:116, SEQ ID NO: 117; SEQ ID NO:118 or SEQ ID NO:120

[0048] In some embodiments, the polynucleotide of the present invention that encodes for a variant VP3 capsid of the present invention consists of the nucleic sequence that ranges from the nucleotide at position 2809 to the nucleotide at position 4410 in SEQ ID NO:1 and that comprises at least one mutation selected from Table 1.

[0049] In some embodiments, the polynucleotide of the present invention that encodes for a variant VP3 capsid of the present invention consists of the nucleic sequence that ranges from the nucleotide at position 2809 to the nucleotide at position 4410 in SEQ ID NO:1 and that comprises at least one mutation selected from the group consisting of 2833A>G; 2853C>T; 2859C>T; 2877G>A; 2899AC>CA; 2905A>C; 2946C>T; 2967C>T; 2970C>G; 2976A>G; 2979A>G; 2982T>C; 3003G>A; 3012T>C; 3036T>C; 3123A>G; 3129G>A; 3165A>G; 3297C>T; 3303A>G; 3318G>C; 3360A>G; 3375A>C; 3411G>T; 3417C>T; 3430ACC>CAG; 3444T>C; 3450G>A; 3490C>T; 3495C>T; 3498T>G; 3501C>G; 3513C>G; 3534C>T; 3535T>C; 3539G>A; 3542GA>AG; 3547AAC>CAA; 3550ACT>TCA; 3553CCA>AAT; 3558T>C; 3564C>T; 3565ACC>CTT; 3568AC>CA; 3576A>C; 3576A>T; 3577A>C; 3582T>A; 3584A>T; 3589TC>AG; 3594G>A; 3597C>T3601GCG>CCC 3605GT>CC 3607GA>AG 3612T>G 3613CGG>TCT 3616GAC>CTT 3621G>A 3622T>G 3626GG>AA 3636T>G 3645C>T 3648T>C 3652CGC>AGA 3663A>T 3664GTA>CTG 3672ACA>CAG 3676TCT>GCA 3679GCG>AAC 3684T>C 3696T>C 3697GAA>AAC 3701AC>TT 3703TCG>CCC 3713GA>CG 3720C>A 3726C>T 3729C>T 3732C>A 3739AGA>CGG 3747T>G 3748C>T 3753G>T 3759G>A 3762C>A 3765G>A 3768C>T 3774A>C 3783G>A 3804T>C 3807T>C 3808CA>AT 3811AGC>CAT 3816G>A 3817GTT>ACC 3822C>G 3825C>A 3831G>A 3834G>A 3840C>A 3841T>A 3844GAG>AAT 3847AAA>GCT 3851CA>AC 3853AAT>GAC 3857T>C 3861C>T 3862ATT>TTG 3867A>C 3870>T 3885C>T 3891G>A 3898AGG>CGC 3903A>C 3930T>C 3933T>A 3935C>A 3939A>G 3942T>A 3944CC>AT 3948C>T 3949CTC>TTG 3954G>A 3956GA>AC 3957A>C 3958GGC>TCA 3963C>T 3965G>C 3967CAA>GGT 3970G>C 3973G>A 3978C>T 3979G>T 3980C>G 3982GA>AC 3990C>T 3991ACA>CAC 3999C>A 4001TT>CG 4003CTT>TTA 4008A>T 4011C>T 4017C>G 4026C>T 4027A>C 4032T>C 4041T>G 4047G>A 4053C>T 4059A>C 4068A>T 4074G>C 4077C>T 4083T>C 4089C>T 4092C>T 4098C>A 4101C>G 4107T>C 4110A>T 4113C>T 4116A>G 4119T>G 4128T>G 4134A>G 4140T>C 4141CTC>ATG 4149G>A 4155C>T 4158G>C 4161A>T 4164T>A 4167G>C 4174TCG>CCC 4179C>A 4181C>A 4189GCG>TCT 4194A>C 4206C>T 4221C>T 4230A>G 4269A>G 4287T>C 4293A>G 4296T>C 4320G>A and 4356C>T.

[0050] In some embodiments, the polynucleotide of the present invention that encodes for a variant VP3 capsid of the present invention consists of the nucleic sequence that ranges from the nucleotide at position 2809 to the nucleotide at position 4410 in SEQ ID NO: 62; 63; 64; 65; 66; 67; 68; 69; 70; 71; 72; 73; 74; 75; 76; 77; 78; 79; 80; 81; 82; 83; 84; 85; 86; 87; 88; 89; 90; 91; 92; 93; 94; 95; 96; 97; 98; 99; 100; 101; 102; 103; 104; 105; 106; 107; 108; 109; 110; 111; 112; 113; 114; 115; 116; 117; or 118.

[0051] In some embodiments, the polynucleotide of the present invention that encodes for a variant VP3 capsid of the present invention consists of the nucleic sequence that ranges from the nucleotide at position 2809 to the nucleotide at position 4410 in SEQ ID NO: 112, SEQ ID NO: 115, SEQ ID NO: 101, SEQ ID NO:105, SEQ ID NO: 111, SEQ ID NO:98, SEQ ID NO:107, SEQ ID NO:109, SEQ ID NO:108, SEQ ID NO:103, SEQ ID NO:116, SEQ ID NO: 62; SEQ ID NO:63; SEQ ID NO:64; SEQ ID NO:65; SEQ ID NO:66; SEQ ID NO:67; SEQ ID NO:68; SEQ ID NO:69; SEQ ID NO:70; SEQ ID NO:71; SEQ ID NO:72; SEQ ID NO:73; SEQ ID NO:74; SEQ ID NO:75; SEQ ID NO:76; SEQ ID NO:77; SEQ ID NO:78; SEQ ID NO:79; SEQ ID NO:80; SEQ ID NO:81; SEQ ID NO:82; SEQ ID NO:83; SEQ ID NO:84; SEQ ID NO:85; SEQ ID NO:86; SEQ ID NO:87; SEQ ID NO:88; SEQ ID NO:89; SEQ ID NO:90; SEQ ID NO: 91; SEQ ID NO:92; SEQ ID NO:93; SEQ ID NO:94; SEQ ID NO:95; SEQ ID NO:96; SEQ ID NO:97; SEQ ID NO: 99; SEQ ID NO:100; SEQ ID NO:101; SEQ ID NO:102; SEQ ID NO:104; SEQ ID NO: 106; SEQ ID NO: 110; SEQ ID NO:113; SEQ ID NO:114; SEQ ID NO: 117; SEQ ID NO:118, SEQ ID NO:119 or SEQ ID NO:120 SEQ ID NO: 85 (i.e. capsid #3013), SEQ ID NO: 68 (i.e. capsid #2087), SEQ ID NO: 79 (i.e. capsid #1449), SEQ ID NO: 69 (i.e. capsid #2206), SEQ ID NO: 71 (i.e. capsid #1534), SEQ ID NO: 115 (i.e. capsid #163), SEQ ID NO: 82 (i.e. capsid #1343), SEQ ID NO: 112 (i.e. capsid #790), SEQ ID NO:65 (i.e. capsid #1017), SEQ ID NO: 70 (i.e. capsid #877), SEQ ID NO: 67 (i.e. capsid #1273), SEQ ID NO: 62 (i.e. capsid #2497); SEQ ID NO: 119 (i.e. capsid #1055); SEQ ID NO: 73 (i.e. capsid #1919), SEQ ID NO:63, SEQ ID NO:64; SEQ ID NO:66, SEQ ID NO: 72, SEQ ID NO: 74, SEQ ID NO: 75, SEQ ID NO: 76, SEQ ID NO: 77, SEQ ID NO: 78, SEQ ID NO:80, SEQ ID NO:81, SEQ ID NO:83, SEQ ID NO:84, SEQ ID NO:86, SEQ ID NO:87; SEQ ID NO:88; SEQ ID NO:89; SEQ ID NO:90; SEQ ID NO: 91; SEQ ID NO:92; SEQ ID NO:93; SEQ ID NO:94; SEQ ID NO:95; SEQ ID NO:96; SEQ ID NO:97; SEQ ID NO:98, SEQ ID NO: 99; SEQ ID NO:100; SEQ ID NO:101; SEQ ID NO:102; SEQ ID NO:103, SEQ ID NO:104; SEQ ID NO:105, SEQ ID NO: 106; SEQ ID NO:107, SEQ ID NO:108, SEQ ID NO:109, SEQ ID NO: 110; SEQ ID NO:111, SEQ ID NO:113; SEQ ID NO:114; SEQ ID NO:116, SEQ ID NO: 117; SEQ ID NO:118 or SEQ ID NO:120.

SEQ ID NO: 62
>#2497_AAV.FL.linear [organism = Adeno-associated virus][mol_type = genomic
DNA][isolation_source = liver tissue][topology = linear]
TTGGCCACTCCCTCTCTGCGCGCTCGCTCGCTCACTGAGGCCGGGCGACCAAAGGTCGCC
CGACGCCCGGGCTTTGCCCGGGCGGCCTCAGTGAGCGAGCGAGCGCGCAGAGAGGGAGTG
GCCAACTCCATCACTAGGGGTTCCTGGAGGGGTGGAGTCGTGACGTGAATTACGTCATAG
GGTTAGGGAGGTCCTGTATTAGAGGTCACGTGAGTGTTTTGCGACATTTTGCGACACCAT
GTGGTCACGCTGGGTATTTAAGCCCGAGTGAGCACGCAGGGTCTCCATTTTGAAGCGGGA
GGTTTGAACGCGCAGCCGCCATGCCGGGGTTTTACGAGATTGTGATTAAGGTCCCCAGCG
ACCTTGACGAGCATTTGCCCGGCATTTCTGACAGCTTTGTGAACTGGGTGGCCGAGAAGG
AATGGGAGTTGCCGCCAGATTCTGACATGGATCTGAATCTGATTGAGCAGGCACCCCTGA
CCGTGGCCGAGAAGCTGCAGCGCGACTTTCTGACGGAATGGCGCCGTGTGAGTAAGGCCC
CGGAGGCCCTTTTCTTTGTGCAATTTGAGAAGGGAGAGAGCTACTTCCACATGCACGTGC
TCGTGGAAACCACCGGGGTGAAATCCATGGTTTTGGGACGTTTCCTGAGTCAGATTCGCG
AAAAACTGATTCAGAGAATTTACCGCGGGATCGAGCCGACTTTGCCAAACTGGTTCGCGG
TCACAAAGACCCGAAATGGCGCCGGAGGCGGGAACAAGGTGGTGGATGAGTGCTACATCC
CCAATTASCTGCTCCCCAAAACCCAGCCTGAGCTCCAGTGGGCGTGGACTAATATGGAAC
AGTATTTAAGCGCCTGTTTGAATCTCGCGGAGCGTAAACGGTTGGTGGCGCAGCATCTGA
CGCACGTGTCGCAGACGCAGGAGCAGAACAAAGAGAATCAGAATCCAAATTCTGACGSRC
CGGTGATCAGATCAAAAACCTCAGCCAGGTACATGGAGCTGGTCGGGTGGCTCGTGGAYA
AGGGGATTACCTCGGAGAAGCAGTGGATCCAGGAGGAYCAGGCTTCATACATCTCCTTCA
ATGCGGCCTCCAACTCGCGGTCCCAAATCAAGGCTGCCTTGGACAATGCGGGAAAGATCA
TGAGCCTCACTAAAACTGCCCCCGACTACCTGGTGGGCCAGCAGCCCGTGGAGGACATTT
CCAGCAATCGGATTTATAAAATTTTGGAACTAAACGGGTACGACCCCCAATACGCGGCTT
CCGTCTTTCTGGGATGGGCCACGAAAAAGTTCGGCAAGAGAAACACCATCTGGCTGTTTG
GGCCTGCAACTACCGGGAAGACCAACATCGCGGAGGCCATAGCCCACACGGTGCCCTTCT
ACGGGTGCGTAAACTGGACCAATGAGAACTTTCCCTTCAATGACTGCGTCGACAAGATGG
TGATCTGGTGGGAGGAGGGGAGGATGACCGCCAAGGTCGTGGAGTCGACCAAAGCCATTC
TTGGCGGAAGCAAGGTGCGCGTGGACCAGAAATGCAAGTCCTCGGCCCAGATAGACCCGA
CTCCCGTGATCGTCACCTCCAACACCAACATGTGCGCCGTGATTGACGGGAACTCAACGA
CCTTCGAACACCAGCAGCCGTTGCAAGACCGGATGTTCAAATTTGAACTCACCCGCCGTC
TGGATCATGACTTTGGGAAGGTCACAAAGCAGGAAGTCAAAGACTTTTTCCGGTGGGCAA
AGGATCACGTGGTTGAGGTGGAGCATGAATTCTACGTCAAAAAGGGTGGAGCCAAGAAAA
GACCCGCCCCCAGTGACGCAGATATAAGTGAGCCCAAACGGGCGCGCGAGTCAGTTGCGC
AGCCATCGACGTCAGACGCGGAAGCTTCGATCAACTACGCGGACAGGTACCAAAACAAAT
GTTCTCGTCACGTGGGCATGAATCTGATGCTGTTTCCCTGCAGACAATGCGAGAGAATGA
ATCAGAATTCAAATATCTGCTTCACTCACGGACAGAAAGACTGTTTAGAGTGCTTTCCCG
TGTCAGAATCTCAACCCGTTTCTGTCGTCAAAAAGGCGTATCAGAAACTTTGCTACATTC
ATCATATCATGGGAAAGGTGCCAGACGCTTGCACTGCCTGCGATCTGGTCAATGTGGATT
TGGATGACTGCATCTCTGAACAATAAATGATTTAAATCAGGTATGGCTGCCGATGGTTAT
CTTCCAGATTGGCTCGAGGACACTCTCTCTGAAGGAATAAGACAGTGGTGGAAGCTYAAA
CCTGGCCCACCACCACCAAAGCCCGCAGAGCGGCATAAGGACGACAGCAGGGGTCTTGTG
CTTCCTGGGTACAAGTACCTCGGACCCTTCAACGGACTCGACAARGGAGAGCCGGTCAAC
GAGGCAGACGCCGCGGCCCTCGAACACGACAAGGCCTACGACCGGCAGCTCGACAGCGGA
GACAACCCGTACCTCAAGTACAACCACGCCGACGCGGAGTTTCAGGAGCGCCTTAAAGAA
GATACGTCTTTTGGGGGCAACCTCGGACGAGCAGTCTTCCAGGCGAAAAAGAGGGTTCTT
GAACCTCTGGGCCTGGTTGAGGAACCTGTTAAGACGGCTCCGGGAAAAAAGAGGCCGGTA
GAGCATTCTCCTGTGGAGCCAGACTCCTCCTCGGGAACCGGAAAGGCGGGCCAGCAGCCT
GCAAGAAAAAGATTGAATTTTGGTCAGACTGGAGACGCAGACTCAGTACCTGACCCCCAG
CCTCTCGGACAGCCACCAGCAGCCCCCTCTGGTCTGGGAACTAATACGATGGCTACAGGC
AGTGGCGCACCAATGGCAGACAATAACGAGGGCGCCGACGGAGTGGGTAATTCCTCGGGA
AATTGGCATTGCGATTCCACATGGATGGGCGACAGAGTCATCACCACCAGCACCCGAACC
TGGGCCCTGCCCACCTACAACAACCACCTCTACAAGCAAATTTCCAGCCAATCAGGAGCC
TCAAACGACAACCACTACTTTGGCTACAGCACCCCTTGGGGGTATTTTGACTTCAACAGA
TTCCACTGCCACTTTTCACCACGTGACTGGCAAAGACTCATCAACAACAACTGGGGATTC
CGACCCAAAAGACTCAACTTCAAGCTCTTTAACATTCAAGTCAAAGAGGTCACGCAGAAT
GACGGTACGACGACGATTGCCAATAACCTTACCAGCACGGTTCAGGTGTTTACTGACTCG
GAGTACCAGCTCCCGTACGTCCTCGGCTCGGCGCATCAAGGATGCCTCCCGCCGTTCCCA
GCAGACGTTTTCATGGTCCCACAGTATGGATACCTCACCCTGAACAACGGGAGTCAGGCG
GTAGGACGCTCTTCMTTTTACTGCCTGGAGTACTTTCCTTCTCAGATGCTGCGTACTGGA
AACAACTTTCAGTTCAGCTACACCTTTGAAGACGTTCCTTTCCACAGCAGCTACGCTCAC
AGCCAGAGTTTGGACCGTCTCATGAATCCTCTCATCGACCAGTACCTGTATTACTTGAGC
AGAACAAACACTCCAAGCGGAACCACCACGCAGTCAAGGCTTCAGTTTTCTCAGGCCGGA
GCGAGTGACATTCGGGACCAGTCTAGGAACTGGCTTCCTGGACCCTGTTACCGCCAGCAG
CGAGTATCAAAGACAGCTGCGGACAACAGCAACAGTGAGTACTCGTGGACTGGTGCTACC
AAGTACCACCTCAATGGAAGAGACTCTCTGGTGAATCCGGGCCCGGCCATGGCCAGCCAC
AAGGACGATGAAGAAAAGTTTTTTCCTCACAGCGGGGTTCTCATCTTTGGGAAGCAAGGC
TCAGAGAAAACAAATGTGGACATTGAAAAGGTCATGATTACAGACGAAGAGGAAATCAGG
ACCACCAATCCCGTGGCTACGGAGCAGTATGGTACTGTATCTACCAACCTCCAGAGCGGC
AACACACAAGCAGCTACCTCAGATGTCAACACACAAGGCATTCTTCCAGGCATGGTCTGG
CAGGACAGAGACGTGTACCTGCAGGGACCCATCTGGGCAAAGATTCCACACACGGACGGA
CACTTTCACCCTTCTCCCCTCATGGGTGGATTCGGACTTAAACACCCTCCTCCACAGATT
CTCATCAAGAACACCCCGGTACCTGCGAATCCTTCGACCACCTTCAGTGCGGCAAAGTTT
GCTTCCTTCATCACACAGTACTCCACGGGACAGGTCAGCGTGGAGATCGAGTGGGAGCTG
CAGAAGGAAAACAGCAAACGCTGGAATCCCGAAATCCAGTACACTTCCAACTACAACAAR
TCTGTTAATGTGGACTTTACTGTGGACACTAATGGTGTGTATTCAGAGCCTCGCCCCATT
GGCACCAGATACCTGACTCGTAATCTGTAATTGCTTGTTAATCAATAAACCGTTTAATTC
GTTTCAGTTGAACTTTGGTCTCTGCGTATTTCTTTCTTATCTAGTTTCCATGGCTACGTA
GATAAGTAGCATGGCGGGTTAATCATTAACTACAAGGAACCCCTAGTGATGGAGTTGGCC
ACTCCCTCTCTGCGCGCTCGCTCGCTCACTGAGGCCGGGCGACCAAAGGTCGCCCGACGC
CCGGGCTTTGCCCGGGCGGCCTCAGTGAGCGAGCGAGCGCGCAGAGAGGGAGTGGCCAA
SEQ ID NO: 63
>#2102_AAV.FL.linear [organism = Adeno-associated virus][mol_type = genomic
DNA][isolation_source = liver tissue][topology = linear]
TTGGCCACTCCCTCTCTGCGCGCTCGCTCGCTCACTGAGGCCGGGCGACCAAAGGTCGCC
CGACGCCCGGGCTTTGCTCGCCCGGCCTCAGTGAGCGAGCGAGCGCGCAGAGAGGGAGTG
GCCAACTCCATCACTAGGGGTTCCTGGAGGGGTGGAGTCGTGACGTGAAGTACGTCATAG
GGTTAGGGAGGTCCTGTATTAGAGGTCACGTGAGTGTTTTGCGACATTTTGCGACATCAT
GTGGTCACGCTTGGGTATTTAAGCCCGAGTGAGCACGCAGGGTCTCCATTTTGAAGCGGG
AGGTTTGAACGTGCAGCCGCCATGCCGGGGTTTTACGAGATTGTGATTAAGGTCCCCAGC
GACCTTGACGAGCATCTGCCCGGCATTTCTGACAGCTTTGTGAACTGGGTGGCCGAGAAG
GAATGGGAGTTGCCGCCAGATTCTGACATGGATCTGAATCTGATTGAGCAGGCACCCCTG
ACCGTGGCCGAGAAGCTGCAGCGCGACTTTCTGACGGAGTGGCGCCGTGTGAGTAAGGCC
CCGGAGGCCCTCTTCTTTGTGCAATTTGAGAAGGGAGAGAGCTACTTCCACATGCACGTG
CTTGTGGAGACCACAGGGGTGAAATCCATGGTTTTGGGACGTTTCCTGAGTCAGATTCGC
GAAAAACTGATTCAGAGAATTTACCGCGGGATCGAGCCGACTTTGCCAAACTGGTTCGCG
GTCACAAAGACCCGAAATGGCGCCGGAGGCGGGAACAAGGTGGTGGATGAGTGCTACATC
CCCAATTACCTGCTCCCCAAAACCCAGCCTGAGCTTCAGTGGGCGTGGACTAATATGGAA
CAGTATTTAAGCGCCTGTTTGAATCTCGCGGAGCGTAAACGGTTGGTGGCGCAGCATCTG
ACGCACGTGTCGCAGACGCAGGAGCAGAACAAAGAGAATCAGAATCCCAATTCTGACGCG
CCGGTGATTAGATCAAAAACCTCAGCCAGGTACATGGAGCTGGTCGGGTGGCTCGTGGAT
AAGGGGATTACGTCGGAGAAGCAGTGGATCCAGGAGGACCAGGCTTCATACATCTCCTTC
AATGCGGCCTCCAACTCGCGGTCCCAAATCAAGGCTGCTCTGGACAATGCGGGAAAGATC
ATGAGCCTCACTAAAACCGCCCCMGACTACCTRGTGGGCCAGCAGCCCGTGGAGGACATT
TCCAGCAATCGGATTTATAAAATCTTGGAACTGAACGGGTACGATCCCCAATACGCGGCT
TCCGTCTTTCTGGGATGGGCCACGAAAAAGTTCGGCAAGAGGAACACCATCTGGCTGTTT
GGGCCTGCAACTACCGGGAAGACCAACATCGCGGAGGCCATAGCCCACACTGTGCCCTTC
TACGGGTGCGTAAACTGGACCAATGAGAACTTTCCCTTCAACGACTGTGTCGACAAGATG
GTGATCTGGTGGGAGGAGGGAAAGATGACCGCCAAGGTCGTGGAGTCGGCCAAAGCCATT
CTCGGCGGAAGCAAGGTGCGCGTGGACCAGAAATGCAAGTCCTCGGCCCAGATAGACCCG
ACTCCCGTGATCGTCACCTCCAACACCAACATGTGCGCCGTGATTGACGGGAACTCAACG
ACCTTCGAACACCAGCAGCCGTTGCAAGACCGGATGTTCAAATTTGAACTCACCCGCCGT
CTGGATCATGACTTTGGGAAGGTCACCAAGCAGGAAGTCAAAGACTTTTTCCGGTGGGCA
AAGGATCACGTGGTTGAGGTGGAGCATGAATTCTACGTCAAAAAGGGTGGAGCCAAGAAA
AGRCCCGCCCCCAGTGACGCAGATATAAGTGAGCCCAAACGGGCGCGCGAGTCAGTTGCG
CAGCCATCGACGTCAGACGCGGAAGCTTCGATCAACTACGCGGACAGGTACCAAAACAAA
TGTTCTCGTCACGTGGGCATGAATCTGATGCTGTTTCCCTGCAGACAATGCGAGAGAATG
AATCAGAATTCAAATATCTGCTTCACTCACGGACAGAAAGACTGTTTAGAGTGCTTTCCC
GTGTCAGAATCTCAACCCGTTTCTGTCGTCAAAAAGGCGTATCAGAAACTTTGCTACATT
CATCATATCATGGGAAAGGTGCCAGACGCTTGCACTGCCTGCGATCTGGTCAATGTGGAT
TTGGATGACTGCATCTCTGAACAATAAATGATTTAAATCAGGTATGGCTGCCGATGGTTA
TCTTCCAGATTGGCTCGAGGACACTCTCTCTGAAGGAATAAGACAGTGGTGGAAGCTCAA
ACCTGGCCCACCACCACCAAAGCCCGCAGAGCGGCATCAGGACGACAGCAGGGGTCTTGT
GCTTCCTGGGTACAAGTACCTCGGACCCTTCAACGGACTCGACAAAGGAGAGCCGGTCAA
CGAGGCAGACGCCGCGGCCCTCGAGCACGACAAGGCCTACGACCGGCAGCTCGAAAGCGG
AGACAACCCGTACCTCAAGTACAACCACGCCGACGCGGAGTTTCAGGAGCGCCTTAAAGA
AGATACGTCTTTTGGGGGCAACCTCGGACGAGCAGTCTTCCAGGCGAAAAAGAGGGTTCT
TGAACCTCTGGGCCTGGTTGAGGAACCTGTTAAGACGGCTCCGGGAAAAAAGAGGCCGGT
AGAGCACTCTCCTGTGGAGCCAGACTCCTCCTCGGGAACCGGAAAGGCGGGCAACCAGCC
TGCAAGAAAGAGATTGAATTTCGGTCAGACTGGAGACGCAGACTCCGTACCTGACCCCCA
ACCTCTCGGACAGCCACCAGCAGCCCCCTCTGGTCTGGGAACTAATACGATGGCTACAGG
CAGTGGCGCACCAATGGCAGACAATAACGAGGGCGCCGACGGAGTGGGTAATTCCTCGGG
AAATTGGCATTGCGATTCCACATGGCTGGGCGACAGAGTCATCACCACCAGCACCCGCAC
CTGGGCTCTGCCCACCTACAACAACCACCTCTACAAGCAAATCTCCAGCCAATCAGGAGC
CTCGAACGACAATCACTACTTTGGCTACAGCACCCCCTGGGGGTATTTTGACTTCAACAG
ATTCCACTGCCACTTTTCACCACGTGACTGGCAAAGACTCATCAACAACAATTGGGGATT
CCGGCCCAAAAGACTCAACTTCAAGCTGTTTAACATTCAAGTCAAAGAGGTCACGCAGAA
TGACGGTACGACGACGATTGCCAATAACCTTACCAGCACGGTTCAGGTGTTTACTGACTC
GGAGTACCAGCTCCCGTACGTCCTCGGCTCGGCGCATCAAGGATGCCTCCCGCCGTTCCC
AGCAGACGTCTTCATGGTGCCACAGTATGGATACCTCACCCTGAACAACGGGAGTCAGGC
GGTCGGACGCTCTTCCTTTTACTGCCTGGAGTACTTTCCTTCTCAAATGCTTCGTACCGG
AAACAACTTTACCTTCAGCTACACCTTTGAAGACGTTCCTTTCCACAGCAGCTACGCTCA
CAGTCAAAGTCTGGACCGTCTCATGAATCCTCTCATCGACCAGTACCTGTATTACTTGAG
CGGAACAAACACTCCAAGCGGAACCACCACGCAGTCCAGGCTTCAGTTTTCTCAGGCCGG
AGCAAGTGACATTCGGGACCAGTCTAGGAACTGGCTTCCTGGACCCTGTTACCGCCAGCA
GCGAGTATCAAAGACAGCTGCGGACAACAGCAACAGTGAGTACTCGTGGACTGGAGCTAC
CAAGTACCACCTCAATGGAAGAGACTCTCTGGTGAATCCGGGCCCGGCCATGGCCAGCCA
CAAGGACGATGAAGAAAAGTTTTTTCCTCAGAGCGGGGTTCTCATCTTTGGGAAGCAAGG
CTCAGAGAAAACAAATGTGGACATTGAAAAGGTCATGATTACAGACGAAGAGGAAATCAG
GACCACCAATCCCGTGGCTACGGAGCAGTATGGTTCTGTATCTACCAACCTCCAGAGCGG
CAACACACAAGCAGCTACCTCAGATGTCAACACACAAGGCGTTCTTCCAGGCATGGTCTG
GCAGGACAGAGACGTGTACCTGCAGGGGCCTATCTGGGCAAAGATTCCACACACGGACGG
ACATTTTCACCCCTCTCCCCTCATGGGTGGATTCGGACTTAAACACCCTCCTCCACAGAT
TCTCATCAAAAACACCCCGGTACCTGCGAATCCTTCGACCACCTTCAGTGCGGCAAAGTT
TGCTTCCTTCATCACACAGTACTCCACGGGACAGGTCAGCGTGGAGATCGAGTGGGAGCT
GCAGAAGGAAAACAGCAAACGCTGGAACCCCGAGATCCAGTACACTTCCAACTACAACAA
ATCTGTTAATGTGGACTTTACTGTGGACACTAATGGTGTGTATTCAGAGCCTCGCCCCAT
TGGCACCAGATACCTGACTCTTAATCTGTAATTGCTTGTTAATCAATAAACCGTTTAATT
CGTTTCAGTTGAACTTTGGTCTCTGCGTACTTCTTTCTTATCTAGTTTCCATGGCTACGT
AGATAAGTAGCATGGCGGGTTAATCATTAACTACAAGGAACCCCTAGTGATGGAGTTGGC
CACTCCCTCTCTGCGCGCTCGCTCGCTCACTGAGGCCGGGCGACCAAAGGTCGCCCGACG
CCCGGGCTTTGCCCGGGCGGCCTCAGTGAGCGAGCGAGCGCGCAGAGAGGGAGTGGCCAA
SEQ ID NO: 64
>#371_AAV.FL.linear [organism = Adeno-associated virus][mol_type = genomic DNA]
[isolation_source = liver tissue][topology = linear]
TTGGCCACTCCCTCTCTGCGCGCTCGCTCGCTCACTGAGGCCGGGCGACCAAAGGTCGAC
CGACGCCCGGGCTTTGGTCGCCCGGCCTCAGTGAGCGAGCGAGCGCGCAGAGAGGGAGTG
GCCAACTCCATCACTAGGGGTTCCTGGAGGGGTGGAGTCGTGACGTGAATTACGTCATAG
GGTTAGGGAGGTCCTGTATTAGAGGTCACGTGAGTGTTTTGCGACATTTTGCGACACCAT
GTGGTCACGCTGGGTATTTAAGCCCGAGTGAGCACGCAGGGTCTCCATTTTGAAGCGGGA
GGTTTGAACGCGCAGCCGCCATGCCGGGGTTTTACGAGATTGTGATTAAGGTCCCCAGCG
ACCTTGACGAGCATCTGCCGGGCATTTCTGACAGCTTTGTGAACTGGGTGGCCGAGAAGG
AATGGGAGTTGCCGCCAGATTCTGACATGGATCTGAATCTGATTGAGCAGGCACCCCTGA
CCGTGGCCGAGAAGCTGCAGCGCGACTTTCTGACGGAGTGGCGCCGTGTGAGTAAGGCCC
CGGAGGCCCTCTTCTTTGTGCAATTTGAGAAGGGAGAGAGCTACTTCCACATGCACGTGC
TGGTGGAGACCACTGGGGTTAAATCCATGGTTTTGGGACGTTTCCTGAGTCAGATTCGCG
AAAAACTGATTCAGAGAATTTACCGCGGGATCGAGCCGACTTTGCCAAACTGGTTCGCGG
TCACAAAGACCCGAAATGGCGCCGGAGGCGGGAACAAGGTGGTGGATGAGTGCTACATCC
CCAATTACCTGCTCCCCAAAACCCAGCCTGAGCTCCAGTGGGCGTGGACTAATATGGAAC
AGTATTTAAGCGCCTGTTTGAATCTCGCGGAGCGTAAACGGTTGGTGGCGCAGCATCTGA
CGCACGTGTCGCAGACGCAGGAGCAGAACAAAGAGAATCAGAATCCCAATTCTGACGCGC
CGGTGATTAGATCAAAAACCTCAGCCAGGTACATGGAGCTGGTCGGGTGGCTCGTGGATA
AGGGGATTACCTCGGAGAAGCAGTGGATCCAGGAGGACCAGGCCTCATACATCTCCTTCA
ATGCGGCCTCCAACTCGCGGTCCCAGATAAAGGCTGCTCTGGACAATGCGGGAAAGATCA
TGAGCCTGACTAAAACGGCCCCCGACTACCTGGTGGGCCAGCAGCCCGTGGAGGACATTT
CCAGCAATCGGATTTATAAAATCTTGGAACTGAACGGGTACGATCCCCAATATGCGGCTT
CCGTCTTTCTGGGATGGGCCACGAAAAAGTTCGGCAAGAGGAACACCATCTGGCTGTTTG
GGCCTGCAACTACCGGGAAGACCAACATCGCGGAGGCCATAGCCCACACTGTGCCCTTCT
ACGGGTGCGTAAACTGGACCAATGAGAACTTTCCTTTCAACGACTGTGTCGACAAGATGG
TGATCTGGTGGGAGGAGGGAAAGATGACCGCCAAGGTCGTGGAGTCGGCCAAAGCCATTC
TCGGAGGAAGCAAGGTGCGCGTGGACCAGAAATGCAAATCCTCGGCCCAGATAGACCCGA
CTCCCGTGATCGTCACCTCCAACACCAACATGTGCGCCGTGATTGACGGGAACTCAACGA
CCTTCGAACACCAGCAGCCGTTGCAAGACCGGATGTTCAAATTTGAACTCACCCGCCGTC
TGGATCATGACTTTGGGAAGGTCACCAAGCAGGAAGTCAAAGACTTTTTCCGGTGGGCAA
AGGATCACGTGGTTGAGGTGGAGCATGAATTCTACGTCAAAAAGGGTGGAGCTAAAAAAA
GACCCGCCCCCAGTGACGCAGATATAAGTGAGCCCAAACGGGCGCGCGAGTCAGTTGCGC
AGCCATCGACGTCAGACGCGGAAGCTTCGATCAACTACGCGGACAGGTACCAAAACAAAT
GTTCTCGTCACGTGGGCATGAATCTGATGCTGTTTCCCTGCAGACAATGCGAGAGAATGA
ATCAAAATTCAAATATCTGCTTCACTCACGGACAGAAAGACTGTTTAGAGTGCTTTCCCG
TGTCAGAATCTCAACCCGTTTCTGTCGTCAAAAAGGCGTATCAGAAACTTTGCTACATTC
ATCATATCATGGGAAAGGTGCCAGACGCTTGCACTGCCTGCGATCTGGTCAATGTGGATT
TGGATGACTGCATCTCTGAACAATAAATGATTTAAATCAGGTATGGCTGCCGATGGTTAT
CTTCCAGATTGGCTCGAGGACACTCTCTCTGAAGGAATAAGACAGTGGTGGAAGCTCAAA
CCTGGCCCACCACCACCAAAGCCCGCAGAGCGGCATAAGGACGACAGCAGGGGTCTTGTG
CTTCCTGGGTACAAGTACCTCGGACCCTTCAACGGACTCGACAAGGGAGAGCCGGTCAAC
GAGGCAGACGCCGCGGCCCTCGAGCACGACAAGGCCTACGACCGGCAGCTCGACAGCGGA
GACAACCCGTACCTCAAGTACAACCACGCCGACGCGGAGTTTCAGGAGCGCCTTAAAGAA
GATACGTCTTTTGGGGGCAACCTCGGACGAGCAGTCTTCCAGGCGAAAAAGAGGGTTCTT
GAACCTCTGGGCCTGGTTGAGGAACCTGTTAAGACGGCTCCGGGAAAAAAGAGGCCGGTA
GAGCACTCTCCTGTGGAGCCAGACTCCTCCTCGGGAACCGGAAAAGCGGGCCAGCAGCCT
GCAAGAAAAAGATTGAATTTTGGTCAGACTGGAGACGCAGACTCCGTACCTGACCCCCAG
CCTCTCGGACAGCCACCAGCAGCCCCCTCTGGTCTGGGAACTAATACGATGGCTACAGGC
AGTGGCGCACCAATGGCAGACAATAACGAGGGCGCCGACGGAGTGGGTAATTCCTCGGGA
AATTGGCATTGCGATTCCACATGGATGGGCGACAGAGTCATCACCACCAGCACCCGCACC
TGGGCTCTGCCCACCTACAACAACCATCTGTACAAACAGATTTCCAGCCAATCAGGAGCC
AGCAACGACAACCACTACTTTGGCTACAGCACCCCCTGGGGGTATTTTGACTTCAACAGA
TTCCACTGCCACTTTTCACCACGTGACTGGCAAAGACTCATCAACAACAACTGGGGATTC
CGACCCAAGAGACTCAACTTCAAGCTATTTAACATTCAAGTCAAAGAGGTCACGCAGAAT
GACGGTACGACGACGATTGCCAATAACCTTACCAGCACGGTTCAGGTGTTTACTGACTCG
GAGTACCAGCTCCCGTACGTCCTCGGCTCGGCGCATCAAGGATGCCTCCCGCCGTTCCCA
GCAGACGTCTTCATGGTGCCACAGTATGGATACCTCACCCTGAACAACGGGAGTCAGGCA
GTAGGACGCTCTTCCTTTTACTGCCTGGAGTACTTTCCTTCTCAGATGCTGCGTACCGGA
AACAACTTTACCTTCAGCTACACCTTTGAGGACGTTCCTTTCCACAGCAGCTACGCTCAC
AGCCAGAGTTTGGACCGTCTCATGAATCCTCTCATCGACCAGTACCTGTATTACTTGAGC
AGAACAAACACTCCAAGCGGAACCACCACGCAGTCCAGGCTTCAGTTTTCTCAGGCCGGA
GCGAGTGACATTCGGGACCAGTCTAGGAACTGGCTTCCTGGACCCTGTTACCGCCAGCAA
CGAGTATCAAAGACATCTGCGGATAACAACAACAGTGAATATTCGTGGACTGGAGCTACC
AAATACCACCTCAATGGCAGAGACTCTCTGGTGAATCCGGGCCCGGCCATGGCCAGCCAC
AAGGACGATGAAGAAAAGTTTTTTCCTCAAAGCGGGGTTCTCATCTTTGGAAAACAAGGC
TCAGAGAAAACAAATGTGGACATTGAAAAGGTCATGATTACAGACGAAGAGGAAATCAGG
ACCACCAATCCCGTGGCTACAGAGCAGTATGGTTCTGTATCTACCAACCTCCAGAGCGGC
AACACACAAGCAGCTACCGCAGATGTCAACACACAAGGCGTTCTTCCTGGCATGGTCTGG
CAGGACAGAGACGTGTACCTGCAGGGGCCCATCTGGGCAAAGATTCCACACACGGACGGA
CATTTTCACCCCTCTCCCCTCATGGGCGGATTCGGACTTAAACACCCTCCTCCACAGATT
CTCATCAAGAACACCCCGGTACCTGCGAATCCTTCGACCACCTTCAGTGCGGCAAAGTTT
GCTTCCTTCATTACACAGTACTCCACGGGGCAGGTCAGCGTGGAGATCGAATGGGAGCTG
CAGAAAGAGAACAGCAAACGCTGGAATCCCGAGATTCAGTACACTTCCAACTACAACAAA
TCTGTTAATGTGGACTTTACTGTGGACACTAATGGTGTGTATTCAGAGCCTCGCCCCATT
GGCACCAGATACCTGACTCGTAATCTGTAATTGCTTGTTAATCAATAAACCGTTTAATTC
GTTTCAGTTGAACTTTGGTCTCTGCGTACTTCTTTTATTATCTAGTTTCCATGGCTACGT
AGATAAGTAGCATGGCGGGTTAATCATTAACTCTAAGGAACCCCTAGTGATGGAGTTGGC
CACTCCCTCTCTGCGCGCTCGCTCGCTCACTGAGGCCGGGCGACCAAAGGTCGCCCGACG
CCCGGGCTTTGCCCGGGCGGCCTCAGTGAGCGAGCGAGCGCGCAGAGAGGGAGTGGCCAA
SEQ ID NO: 65
>#1017_AAV.FL.linear [organism = Adeno-associated virus][mol_type = genomic
DNA][isolation_source = liver tissue][topology = linear]
TTGGCCACTCCCTCTCTGCGCGCTCGCTCGCTCACTGAGGCCGGGCGACCAAAGGTCGCC
CGACGCCCGGGCTTTGCCCGGGCGGCCTCAGTGAGCGAGCGAGCGCGCAGAGAGGGAGTG
GCCAACTCCATCACTAGGGGTTCCTGGAGGGGTGGAGTCGTGACGTGAAGTACGTCATAG
GGTTAGGGAGGTCCTGTATTAGAGGTCACGTGAGTGTTTTGCGACATTTTGCGACACCAT
GTGGTCACGCTGGGTATTTAAGCCCGAGTGAGCACGCAGGGTCTCCATTTTGAAGCGGGA
GGTTTGAACGCGCAGCCGCCATGCCGGGATTTTACGAGATTGTGATTAAGGTCCCCAGCG
ACCTTGACGAGCATCTGCCCGGCATTTCTGACAGCTTTGTGAACTGGGTGGCCGAGAAGG
AATGGGAGTTGCCGCCAGATTCTGACATGGATCTGAATCTGATTGAGCAGGCACCCCTGA
CCGTGGCCGAGAAGCTGCAGCGCGACTTTCTGACGGAATGGCGCCGTGTGAGTAAGGCCC
CGGAGGCCCTCTTCTTTGTGCAATTTGAGAAGGGAGAGAGCTACTTCCACATGCACGTGC
TCGTGGAGACTACCGGGGTGAAATCCATGGTTTTGGGACGTTTCCTGAGTCAGATTCGCG
AAAAACTGATTCAGAGAATTTACCGCGGGATCGAGCCGACTTTGCCAAACTGGTTCGCGG
TCACAAAGACCCGAAATGGCGCCGGAGGCGGGAACAAGGTGGTGGATGAGTGCTACATCC
CCAATTACCTGCTCCCCAAAACCCAGCCTGAGCTCCAGTGGGCGTGGACTAATATGGAAC
AGTATTTAAGCGCCTGTTTGAATCTCGCGGAGCGTAAACGGTTGGTGGCGCAGCATTTGA
CGCACGTGTCGCAGACGCAGGAGCAGAACAAAGAGAATCAGAATCCCAATTCTGACGCGC
CGGTGATTAGATCAAAAACCTCAGCCAGGTACATGGAGCTGGTCGGGTGGCTCGTGGATA
AGGGGATTACGTCGGAGAAGCAGTGGATCCAGGAGGACCAGGCCTCATACATCTCCTTCA
ATGCGGCCTCCAACTCGCGGTCCCAAATCAAGGCTGCTCTGGACAATGCGGGAAAGATCA
TGAGCCTCACTAAAACCGCCCCCGACTACCTGGTGGGCCAGCAGCCCGTGGAGGACATTT
CCAGCAATCGGATTTATAAAATCTTGGAACTGAACGGGTACGATCCCCAATATGCGGCTT
CCGTCTTTCTGGGATGGGCCACAAAAAAGTTCGGCAAGAGGAACACCATCTGGCTGTTTG
GGCCTGCAACTACCGGGAAGACCAACATCGCGGAGGCCATAGCCCACACTGTGCCCTTCT
ACGGGTGCGTAAACTGGACCAATGAGAACTTTCCTTTCAACGACTGTGTCGACAAGATGG
TGATCTGGTGGGAGGAGGGAAAGATGACCGCCAAGGTTGTGGAGTCGGCCAAAGCCATTC
TCGGAGGAAGCAAGGTGCGCGTGGACCAGAAATGCAAGTCCTCGGCCCAGATAGACCCGA
CTCCCGTGATCGTCACCTCCAACACCAACATGTGCGCCGTGATTGACGGGAACTCAACGA
CCTTCGAACACCAGCAGCCGTTGCAAGACCGGATGTTCAAATTTGAACTCACCCGCCGTC
TGGATCATGACTTTGGGAAGGTCACCAAGCAGGAAGTCAAAGACTTTTTCCGGTGGGCAA
AGGATCACGTGGTTGAGGTGGAGCATGAATTCTACGTCAAAAAGGGTGGAGCCAAGAAAA
GACCCGCCCCCAGTGACGCAGATATAAGTGAGCCCAAACGGGCGCGCGAGTCAGTTGCGC
AGCCATCGACGTCAGACGCGGAAGCTTCGATCAACTACGCGGACAGGTACCAAAACAAAT
GTTCTCGTCACGTGGGCATGAATCTGATGCTGTTTCCCTGCAGACAATGCGAGAGAATGA
ATCAGAATTCAAATATCTGCTTCACTCACGGACAGAAAGACTGTTTAGAGTGCTTTCCCG
TGTCAGAATCTCAACCCGTTTCTGTCGTCAAAAAGGCGTATCAGAAACTGTGCTACATTC
ATCATATCATGGGAAAGGTGCCAGACGCTTGCACTGCCTGCGATCTGGTCAATGTGGATT
TGGATGACTGCATCTCTGAACAATAAATGATTTAAATCAGGTATGGCTGCCGATGGTTAT
CTTCCAGATTGGCTCGAGGACACTCTCTCTGAAGGAATAAGACAGTGGTGGAAGCTCAAA
CCTGGCCCACCACCACCAAAGCCCGCAGAGCGGCATAAGGACGACAGCAGGGGTCTTGTG
CTTCCTGGGTACAAGTACCTCGGACCCTTCAACGGACTCGACAAGGGAGAGCCGGTCAAC
GAGGCAGACGCCGCGGCCCTCGAGCACGACAAGGCCTACGACCGGCAGCTCGACAGCGGA
GACAACCCGTACCTCAAGTACAACCACGCCGACGCGGAGTTTCAGGAGCGCCTTAAAGAA
GATACGTCTTTTGGGGGCAACCTCGGACGAGCAGTCTTCCAGGCGAAAAAGAGGGTTCTT
GAACCTCTGGGCCTGGTTGAGGAACCTGTTAAGACGGCTCCGGGAAAAAAGAGGCCGGTA
GAGCACTCTCCTGTGGAGCCAGACTCCTCTTCGGGAACCGGAAAAGCGGGCCAGCAGCCT
GCAAGAAAAAGACTGAATTTCGGTCAGACTGGAGACGCAGACTCCGTACCTGACCCCCAG
CCTCTCGGACAGCCACCAGCAGCCCCCTCTGGTCTGGGAACTAATACGATGGCTTCAGGC
AGTGGCGCACCAATGGCAGACAATAACGAGGGCGCCGACGGAGTGGGTAATTCCTCGGGA
AATTGGCATTGCGATTCCACATGGATGGGCGACAGAGTCATCACCACCAGCACCCGAACC
TGGGCCCTGCCCACCTACAACAACCATCTCTACAAGCAGATTTCCAGCCAATCAGGAGCT
TCAAACGACAACCACTACTTTGGCTACAGCACCCCCTGGGGGTATTTTGACTTCAACAGA
TTCCACTGCCACTTCTCGCCACGTGACTGGCAGAGACTCATCAACAACAACTGGGGATTC
CGTCCCAAGAGACTCAACTTCAAGCTGTTTAACATTCAAGTCAAAGAGGTCACGCAGAAT
GACGGTACGACGACGATTGCCAATAACCTTACCAGCACGGTTCAGGTGTTTACTGACTCG
GAGTACCAGCTCCCGTACGTCCTCGGTTCGGCGCATCAAGGATGCCTCCCGCCGTTCCCA
GCAGACGTCTTCATGGTGCCACAGTATGGATACCTCACCCTGAACAACGGGAGTCAGGCG
GTAGGACGCTCTTCATTTTACTGCCTGGAGTACTTTCCTTCTCAGATGCTGCGTACCGGA
AACAACTTTACCTTCAGCTACACCTTTGAGGACGTTCCTTTCCACAGCAGCTACGCTCAC
AGCCAGAGTTTGGACCGTCTCATGAATCCTCTCATCGACCAGTACCTGTATTACTTGAGC
AGAACAAACACTCCAAGCGGAACCACTACGCAGTCCAGGCTTCAGTTTTCTCAGGCCGGA
GCGAGTGACATTCGGGACCAGTCTAGGAACTGGCTTCCTGGACCCTGTTACCGCCAGCAG
CGAGTATCAAAAACATCTGCGGATAACAACAACAGTGAATACTCGTGGACTGGAGCTACC
AAGTACCACCTCAATGGCAGAGACTCTCTGGTGAATCCGGGCCCGGCCATGGCCAGCCAC
AAGGACGATGAAGAAAAGTTTTTTCCTCAGAGCGGGGTTCTCATCTTTGGAAAACAAGAC
TCAGGAAAAACTAATGTGGACATTGAAAAGGTCATGATTACAGACGAAGAGGAAATCAGG
ACCACCAATCCCGTGGCTACGGAGCAGTATGGTGCTGTATCTACCAACCTCCAGAGCGGC
AACACACAAGCAGCTACCTCAGATGTCAACGCACAAGGTGTTCTTCCAGGCATGGTCTGG
CAGGACAGAGAYGTGTACCTGCAGGGGCCCATCTGGGCAAAGATTCCWCACACGGAYGGA
CAYTTTCACCCCTCTCCCCTCATGGGCGGATTCGGACTGAAACACCCTCCTCCACAAATT
CTCATCAAGAACACCCCGGTACCTGCGAATCCTTCAACCACCTTCAGTGCGGCAAAGTTT
GCTTCCTTCATYACACAGTACTCCACGGGGCAGGTCAGCGTGGAGATCGAGTGGGAGCTG
CAGAAGGAAAACAGCAAACGCTGGAATCCCGAAATTCAGTACACTTCCAACTACAACAAA
TCTGTTAATGTGGACTTTACTGTGGACACTAATGGCGTGTATTCAGAGCCTCGCCCCATT
GGCACCAGATACCTGACTCGTAATCTGTAATTGCTTGTTAATCAATAAACCGTGTAATTC
GTTTCAGTTGAACTTTGGTCTCTGCGTACTTATTTCTTATCTAGTTTCCATGGCTACGTA
GATAAGTAGCATGGCGGGTTAATCATTAACTCTAAGGAACCCCTAGTGATGGAGTTGGCC
ACTCCCTCTCTGCGCGCTCGCTCGCTCACTGAGGCCGCCCGGGCAAAGGTCGCCCGACGC
CCGGGCGTCGGGCGACCGGCCTCAGTGAGCGAGCGAGCGCGCAGAGAGGGAGTGGCCAA
SEQ ID NO: 66
>#473_AAV.FL.linear [organism = Adeno-associated virus][mol_type = genomic DNA]
[isolation_source = liver tissue][topology = linear]
TTGGCCACTCCCTCTCTGCGCGCGCGCTCGCTCACTGAGGCCGGGCGACCAAAGGTCGCC
CGACGCCCGGGCTTTGCCCGGGCGGCCTCAGTGAGCGAGCGAGCGCGCAGAGAGGGAGTG
GCCAACTCCATCACTAGGGGTTCCTGGATGGGTGGAGTCGTGACGTAAAGTACGTCATAG
GGTTAGGGAGGTCCTGTATTAGAGGTCACGTGAGTGTTTTGCGACATTTTGCGACACCAT
GTGGTTACGCTGGGTATTTAAGCCCGAGTGAGCACGCAGGGTCTCCATTTTGAAGCGGGA
GGTTTGAACGCGCAGTCGCCATGCCGGGGTTTTACGAGATTGTGATTAAGGTCCCCAGCG
ACCTTGACGAGCATTTGCCCGGCATTTCTGACAGCTTTGTGAACTGGGTGGCCGAGAAGG
AATGGGAGTTGCCGCCAGATTCTGACATGGATCTGAATCTGATTGAGCAGGCACCCCTGA
CCGTGGCCGAGAAGCTGCAGCGCGACTTTCTGACGGAATGGCGCCGTGTGAGTAAGGCCC
CGGAGGCCCTCTTCTTTGTGCAATTTGAGAAGGGAGAAAGCTACTTCCACATGCACGTGC
TGGTGGAGACCACCGGGGTGAAATCAATGGTTTTGGGACGTTTCCTGAGTCAGATTCGCG
AAAAACTGATTCAGAGAATTTACCGCGGGATCGAGCCGACTTTGCCAAACTGGTTCGCGG
TCACAAAGACCCGAAATGGCGCCGGAGGCGGGAACAAGGTGGTGGATGAGTGCTACATCC
CCAATTACCTGCTCCCCAAAACCCAGCCTGAGCTCCAGTGGGCGTGGACTAATATGGAAC
AGTATTTAAGCGCCTGTTTGAATCTCGCGGAGCGTAAACGGTTGGTGGCGCAGCATCTGA
CGCACGTGTCGCAGACGCAGGAGCAGAACAAAGAGAATCAGAATCCCAATTCTGACGCGC
CGGTGATTAGATCAAAAACCTCAGCCAGGTACATGGAGCTGGTCGGGTGGCTCGTGGACA
AGGGGATTACCTCGGAGAAGCAGTGGATCCAGGAGGACCAGGCTTCATACATCTCCTTCA
ATGCGGCCTCCAACTCGCGGTCCCAGATCAAGGCTGCTCTGGACAATGCGGGAAAGATCA
TGAGCCTGACTAAAACGGCCCCCGACTACCTGGTGGGCCAGCAGCCCGTGGAGGACATTT
CCAGCAATCGGATTTATAAAATCTTGGAACTGAACGGGTACGATCCCCAATACGCGGCTT
CCGTCTTTCTGGGATGGGCCACGAAAAAGTTCGGCAAGAGGAACACCATCTGGCTGTTTG
GGCCTGCAACTACCGGAAAGACCAACATCGCGGAGGCCATAGCCCACACTGTGCCCTTCT
ACGGGTGCGTAAACTGGACCAATGAGAACTTTCCCTTCAACGACTGTGTCGACAAGATGG
TGATCTGGTGGGAGGAGGGGAAGATGACCGCCAAGGTTGTGGAGTCGGCCAAAGCCATTC
TCGGAGGAAGCAAGGTGCGCGTGGACCAGAAATGCAAGTCCTCGGCCCAGATAGACCCGA
CTCCCGTGATCGTCACCTCCAACACAAACATGTGCGCCGTGATTGACGGGAACTCAACGA
CCTTCGAACACCAGCAGCCGTTGCAAGACCGGATGTTCAAATTTGAACTCACCCGCCGTC
TGGATCATGACTTTGGGAAGGTCACCAAGCAGGAAGTCAAAGACTTTTTCCGGTGGGCAA
AGGATCACGTGGTTGAGGTGGAGCATGAATTCTACGTCAAAAAGGGTGGAGCCAAGAAAA
GACCCGCCCCCAGTGACGCAGATATAAGTGAGCCCAAACGGGCGCGCGAGTCAGTTGCGC
AGCCATCGACGTCAGACGCGGAAGCTTCGATCAACTACGCGGACAGGTACCAAAACAAAT
GTTCTCGTCACGTGGGCATGAATCTGATGCTGTTTCCCTGCAGACAATGCGAGAGAATGA
ATCAGAATTCAAATATCTGCTTCACTCACGGACAGAAAGACTGTTTAGAGTGCTTTCCCG
TGTCAGAATCTCAACCCGTTTCTGTCGTCAAAAAGGCGTATCAGAAACTTTGCTACATTC
ATCATATCATGGGAAAGGTACCAGACGCTTGCACTGCCTGCGATCTGGTCAATGTGGATT
TGGATGACTGCATCTCTGAACAATAAATGATTTAAATCAGGTATGGCTGCCGATGGTTAT
CTTCCAGATTGGCTCGAGGACACTCTCTCTGAAGGAATAAGACAGTGGTGGAAGCTCAAA
CCTGGCCCACCACCACCAAAGCCCGCAGAGCGGCATAAGGACGACAGCAGGGGTCTTGTG
CTTCCTGGGTACAAGTACCTCGGACCCTTCAACGGACTCGACAAGGGGGAGCCGGTCAAC
GAGGCAGACGCCGCGGCCCTCGAGCACGACAAGGCCTACGACCGGCAGCTCGACAGCGGA
GACAACCCGTACCTCAAGTACAACCACGCCGACGCGGAGTTTCAGGAGCGCCTTAAAGAA
GATACGTCTTTTGGGGGCAACCTCGGACGAGCAGTCTTCCAGGCGAAAAAGAGGGTTCTT
GAACCTCTGGGCCTGGTTGAGGAACCTGTTAAGACGGCTCCGGGAAAAAAGAGGCCGGTA
GAGCACTCTCCTGCGGAGCCAGACTCCTCCTCGGGAACCGGAAAAGCGGGCCAGCAGCCT
GCAAGAAAAAGATTGAATTTCGGTCAGACTGGAGACGCAGACTCCGTACCTGACCCCCAG
CCTCTCGGACAGCCACCAGCAGCCCCCTCTGGTCTGGGAACTAATACGATGGCTACAGGC
AGTGGCGCACCAATGGCAGACAATAACGAGGGCGCCGACGGAGTGGGTAATTCCTCGGGA
AATTGGCATTGCGATTCCACATGGATGGGCGACAGAGTCATCACCACCAGCACCCGCACC
TGGGCTCTGCCCACCTACAACAACCATCTGTACAAGCAGATTTCCAGCCAATCAGGAGCC
AGCAACGACAACCACTACTTTGGCTACAGCACCCCCTGGGGGTATTTTGACTTCAACAGA
TTCCACTGCCACTTTTCACCACGTGACTGGCAAAGACTCATCAACAACAACTGGGGATTC
CGGCCAAAAAGACTCAACTTCAAGCTCTTTAACATTCAAGTCAAGGAGGTCACGCAGAAT
GACGGTACGACGACGATTGCCAATAACCTTACCAGCACGGTTCAGGTGTTTACTGACTCG
GAGTACCAGCTCCCGTACGTCCTGGGCTCGGCGCATCAAGGATGCCTCCCGCCGTTCCCA
GCAGACGTCTTCATGGTGCCACAGTATGGATACCTCACCCTGAACAACGGGAGTCAGGCG
GTAGGACGCTCTTCCTTTTACTGCCTGGAGTACTTTCCTTCTCAGATGCTTCGTACCGGA
AACAACTTTACCTTCAGCTACACCTTTGAAGACGTTCCTTTCCACAGCAGCTACGCTCAC
AGTCAAAGTCTGGACCGTCTCATGAATCCTCTCATCGACCAGTACCTGTATTACTTGAGC
AGAACAAACACTCCAAGCGGAACCACCACGCAGTCCAGGCTTCAGTTTTCTCAGGCCGGA
GCGAGTGACATTCGGGACCAGTCTAGGAACTGGCTTCCTGGACCCTGTTACCGCCAGCAG
CGAGTATCAAAGACAGCTGCGGATAACAACAACAGTGAATACTCGTGGACTGGAGCTACC
AAGTACCACCTCAATGGCAGAGACTCTCTGGTGAATCCGGGCCCGGCCATGGCCAGCCAC
AAGGACGATGAAGAAAAGTTTTTTCCTCAGAGCGGGGTTCTCATCTTTGGAAAACAAGAC
TCAGGAAAAACTAATGTGGACATTGAAAAGGTCATGATTACAGACGAAGAGGAAATCAGG
ACCACCAATCCCGTGGCTACGGAGCAGTATGGTGCTGTATCTACCAACCTCCAGAGCGGC
AACACACAAGCAGCTACCTCAGATGTCAACGCACAAGGCGTTCTTCCAGGCATGGTCTGG
CAGGACAGAGACGTGTACCTGCAGGGGCCCATCTGGGCAAAGATTCCACACACGGACGGA
CATTTTCACCCCTCTCCCCTCATGGGTGGATTCGGACTTAAACACCCTCCCCCGCAGATT
CTCATCAAGAACACCCCGGTACCTGCGAATCCTTCGACCACCTTCAGTGCGGCAAAGTTT
GCTTCCTTTATCACACAGTACTCCACGGGGCAGGTCAGCGTGGAGATCGAGTGGGAGCTG
CAGAAGGAGAACAGCAAACGCTGGAATCCCGAGATTCAGTACACTTCCAACTACAACAAA
TCTGTTAATGTGGACTTTACTGTGGACACTAATGGCGTGTATTCAGAGCCTCGCCCCATT
GGCACCAGATACCTGACTCGTAATCTGTAATTGCTTGTTAATCAATAAACCGTTTAATTC
GTTTCAGTTGAACTTTGGTCTCTGCGTACTTATTTCTTATCTAGTTTCCATGGCTACGTA
GATAAGTAGCATGGCGGGTTAATCATTAACTCTAAGGAACCCCTAGTGATGGAGTTGGCC
ACTCCCTCTCTGCGCGCTCGCTCGCTCACTGAGGCCGCCCGGGCAAAGCCCGGGCGACGC
CCGGGCTTTGCCCGGGCGGCCTCAGTGAGCGAGCGAGCGCGCAGAGAGGGAGTGGCCAA
SEQ ID NO: 67
>#1273_AAV.FL.linear [organism = Adeno-associated virus][mol_type = genomic
DNA][isolation_source = liver tissue][topology = linear]
TTGGCCACTCCCTCTCTGCGCGCTCGCTCGCTCACTGAGGCCGGGCGACCAAAGGTCGCC
CGACGCCCGGGCTTTGCCCGGGCGGCCTCAGTGAGCGAGCGAGCGCGCAGAGAGGGAGTG
GCCAACTCCATCACTAGGGGTTCCTGGAGGGGTGGAGTCGTGACGTGAAGTACGTCATAG
GGTTAGGGAGGTCCTGTATTAGAGGTCACGTGAGTGTTTTGCGACATTTTGCGACACCAT
GTGGTCACGCTGGGTATTTAAGCCCGAGTGAGCACGCAGGGTCTCCATTTTGAAGCGGGA
GGTTTGAACGCGCAGCCGCCATGCCGGGGTTTTACGAGATTGTGATTAAGGTCCCCAGCG
ACCTTGACGAGCATCTGCCCGGCATTTCTGACAGCTTTGTGAACTGGGTGGCCGAGAAGG
AATGGGAGTTGCCGCCAGATTCTGACATGGATCTGAATCTGATTGAGCAGGCACCCCTGA
CCGTGGCCGAGAAGCTGCAGCGCGACTTTCTGACGGAGTGGCGCCGCGTGAGTAAGGCCC
CGGAGGCCCTCTTCTTTGTGCAATTTGAGAAGGGAGAGAGCTACTTCCACATGCACGTGC
TGGTGGAGACCACCGGGGTGAAATCCATGGTTTTGGGACGTTTCCTGAGTCAGATTCGCG
AAAAACTGATTCAGAGAATTTACCGCGGGATCGAGCCGACTTTGCCAAACTGGTTCGCGG
TCACAAAGACCCGAAATGGCGCCGGAGGCGGGAACAAGGTGGTGGATGAGTGCTACATCC
CCAATTACCTGCTCCCCAAAACCCAGCCTGAGCTCCAGTGGGCGTGGACTAATATGGAAC
AGTATTTAAGCGCCTGTTTGAATCTCGCGGAGCGTAAACGGTTGGTGGCGCAGCATCTGA
CGCACGTGTCGCAGACGCAGGAGCAGAACAAAGAGAATCAGAATCCAAATTCTGACGCGC
CGGTGATTAGATCAAAAACCTCAGCCAGGTATATGGAGCTGGTCGGGTGGCTCGTGGATA
AGGGGATTACCTCGGAGAAGCAGTGGATCCAGGAGGATCAGGCTTCATACATCTCCTTCA
ATGCGGCCTCTAACTCGCGATCCCAGATCAAGGCTGCTCTGGACAATGCGGGAAAGATCA
TGAGCCTGACTAAAACCGCCCCCGACTACCTGGTGGGCCAGCATCCCGTGGAGGACATTT
CCAGCAATCGGATTTATAAAATCTTGGAACTGAACGGGTACGATCCCCAATACGCGGCTT
CCGTCTTTCTGGGATGGGCCACGAAAAAGTTCGGCAAGAGGAACACCATCTGGCTGTTTG
GGCCTGCAACTACCGGGAAGACCAACATCGCGGAGGCCATAGCCCACACGGTGCCCTTCT
ACGGGTGCGTAAACTGGACCAATGAGAACTTTCCATTCAACGACTGTGTCGACAAGATGG
TGATCTGGTGGGAGGAGGGGAAGATGACCGCCAAGGTCGTGGAGTCGGCCAAAGCCATTC
TCGGAGGAAGCAAGGTGCGCGTGGACCAGAAATGCAAGTCCTCGGCCCAGATAGACCCGA
CTCCCGTGATCGTCACCTCCAACACCAACATGTGCGCCGTGATTGACGGGAACTCAACGA
CCTTCGAGCACCAGCAGCCGTTGCAAGACCGGATGTTCAAATTTGAACTCACCCGCCGTC
TGGATCATGACTTTGGGAAGGTCACCAAGCAGGAAGTCAAAGACTTTTTCCGGTGGGCAA
AGGATCACGTGGTTGAGGTGGAGCATGAATTCTACGTCAAAAAGGGTGGAGCCAAAAAAA
GACCCGCCCCCAGTGACGCAGATATAAGTGAGCCCAAACGGGTGCGCGAGTCAGTTGCGC
AGCCATCGACGTCAGACGCGGAAGCTTCAATCAACTACGCGGACAGGTACCAAAACAAAT
GTTCTCGTCACGTGGGCATGAATCTGATGCTGTTTCCCTGCAGACAATGCGAGAGAATGA
ATCAGAATTCAAATATTTGCTTCACTCACGGACAGAAAGACTGTTTAGAGTGCTTTCCCG
TGTCAGAATCTCAACCCGTTTCTGTCGTCAAAAAGGCGTATCAGAAACTGTGCTACATTC
ATCATATCATGGGAAAGGTGCCAGACGCTTGCACTGCCTGCGATCTGGTCAATGTGGATT
TGGATGACTGCATCTCTGAACAATAAATGATTTAAATCAGGTATGGCTGCCGATGGTTAT
CTTCCAGATTGGCTCGAGGACACTCTCTCTGAAGGAATAAGACAGTGGTGGAAGCTCAAA
CCTGGCCCACCACCACCAAAGCCCGCAGAGCGGCATCAGGACGACAGCAGGGGTCTTGTG
CTTCCTGGGTACAAGTACCTCGGACCCTTCAACGGACTCGACAAGGGAGAGCCGGTCAAC
GAGGCAGACGCCGCGGCCCTCGAGCACGACAAGGCCTACGACCGGCAGCTCGACAGCGGA
GACAACCCGTACCTCAAGTACAACCACGCCGACGCGGAGTTTCAGGATCGCCTTAAAGAA
GATACGTCTTTTGGGGGCAACCTCGGACGAGCAGTCTTCCAGGCGAAAAAGAGGGTTCTT
GAACCTCTGGGCCTGGTTGAGGAACCTGTTAAAACGGCTCCGGGAAAAAAGAGGCCGGTA
GAGCACTCTCCTGTGGAGCCAGACTCCTCCTCGGGAACCGGAAAAGCGGGCCAGCAGCCT
GCAAGAAAGAGATTGCAGACTGGAGACGCAGACTCCGTACCTGACCCCCAGCCTCTCGGA
CAGCCACCAGCAGCCCCCTCTGGTCTGGGAACTAATACGATGGCTACAGGCAGTGGCGCA
CCAATGGCAGACAATAACGAGGGCGCCGACGGAGTGGGTAATTCCTCGGGAAATTGGCAT
TGCGATTCCACATGGATGGGCGACAGAGTCATCACCACCAGCACCCGCACCTGGGCTCTG
CCCACCTACAACAACCATCTGTACAAGCAGATATCCAGCCAGTCTGGAGCCAGCAACGAC
AACCACTACTTTGGCTACAGCACCCCCTGGGGGTATTTTGACTTCAACAGATTCCACTGC
CACTTTTCACCACGTGACTGGCAAAGACTCATCAACAACAACTGGGGATTCCGGCCAAAA
AGACTCAACTTCAAGCTCTTTAACATTCAAGTCAAGGAGGTCACGCAGAATGACGGTACG
ACAACGATTGCCAATAACCTTACCAGCACGGTTCAGGTGTTTACTGACTCGGAGTACCAG
CTCCCGTACGTCCTCGGCTCGGCGCATCAAGGATGCCTCCCGCCGTTCCCAGCAGACGTC
TTCATGGTGCCACAGTATGGATACCTCACCCTGAACAACGGGAGTCAGGCAGTAGGACGC
TCTTCATTTTACTGCCTGGAGTACTTTCCTTCTCAGATGCTTCGTACCGGAAACAACTTT
ACCTTCAGCTACACTTTTGAGGACGTTCCTTTCCACAGCAGCTACGCTCACAGCCAGAGT
TTGGACCGTCTCATGAATCCTCTCATCGACCAGTACCTGTATTACTTGAGCAGAACAAAC
ACTCCAAGCGGAACCACTACGCAGTCCAGGCTTCAGTTTTCTCAGGCCGGAGCGAGTGAC
ATTCGGGACCAGTCTAGGAACTGGCTTCCTGGACCCTGTTACCGCCAGCAGCGAGTATCA
AAGACAGCTGCGGACAACAACAACAGTGAATACTCGTGGACTGGAGCTACCAAGTACCAC
CTCAATGGCAGAGACTCTCTGGTGAATCCGGGCCCGGCCATGGCCAGCCACAAGGACGAT
GAAGAAAAGTTTTTTCCTCAGAGCGGGGTTCTCATCTTTGGAAAACAAGACTCGGGAAAA
ACTAATGTGGACATTGAAAAGGTCATGATTACAGACGAAGAGGAAATCAGGACCACCAAT
CCCGTGGCTACGGAGCAGTATGGTGCTGTATCTACCAACCTCCAGAGCGGCAACACACAA
GCAGCTACCTCAGATGTCAACGCACAAGGTGTTCTTCCAGGCATGGTCTGGCAGGACAGA
GACGTGTACCTGCAGGGGCCCATCTGGGCAAAGATTCCACACACGGACGGACATTTTCAC
CCCTCTCCCCTCATGGGCGGATTCGGACTTAAACACCCTCCTCCACAAATTCTCATCAAG
AACACCCCTGTACCTGCGAATCCTTCGACCACCTTCAGTGCGGCAAAGTTTGCTTCCTTC
ATTACACAGTACTCCACGGGGCAGGTCAGCGTGGAGATCGAGTGGGAGCTGCAGAAAGAG
AACAGCAAACGCTGGAATCCCGAGATTCAGTACACTTCCAACTACAACAAATCTGTTAAT
GTGGACTTTACTGTAGACACTAATGGTGTGTATTCAGAGCCTCGCCCCATTGGCACCAGA
TACCTGACTCGTAATCTGTAATTGCTTGTTAATCAATAAACCGTTTAATTCGTTTCAGTT
GAACTTTGGTCTCTGCGTACTTATTTCTTATCTGGTTTCCATGGCTACGTAGATAAGTAG
CATGGCGGGTTAATCATTAAATCTAAGGAACCCCTAGTGATGGAGTTGGCCACTCCCTCT
CTGCGCGCTCGCTCGCTCACTGAGGCCGGGCGACCAAAGGTCGCCCGACGCCCGGGCTTT
GCCCGGGCGGCCTCAGTGAGCGAGCGAGCGCGCAGAGAGGGAGTGGCCAA
SEQ ID NO: 68
>#2087_AAV.FL.linear [organism = Adeno-associated virus][mol_type = genomic
DNA][isolation_source = liver tissue][topology = linear]
TTGGCCACTCCCTCTCTGCGCGCTCGCTCGCTCACTGAGGCCGGGCGACCAAAGGTCGCC
CGACGCCCGGGCTTTGCCCGGGCGGCCTCAGTGAGCGAGCGAGCGCGCAGAGAGGGAGTG
GCCAACTCCATCACTAGGGGTTCCTGGAGGGGTGGAGTCGTGACGTGAAGTACGTCATAG
GGTTAGGGAGGTCCTGTATTAGAGGTCACGTGAGTGTTTTGCGACATTTTGCGACGCCAT
GTGGTCACGCTGGGTATTTAAGCCCGAGTGAGCACGCAGGGTCTCCATTTTGAAGCGGGA
GGTTTGAACGCGCAGCCGCCATGCCGGGGTTTTACGAGATTGTGATTAAGGTCCCCAGCG
ACCTTGACGAGCATTTGCCCGGCATTTCTGACAGCTTTGTGAACTGGGTGGCCGAGAAGG
AATGGGAGTTGCCGCCAGATTCTGACATGGATCTGAATCTGATTGAGCAGGCACCCCTGA
CCGTGGCCGAGAAGCTGCAGCGCGACTTTCTGACGGAGTGGCGCCGCGTGAGTAAGGCCC
CGGAGGCCCTCTTCTTTGTGCAATTTGAGAAGGGAGAGAGCTACTTCCACATGCACGTGC
TCGTGGAAACCACCGGGGTGAAATCCATGGTTTTGGGACGTTTCCTGAGTCAGATTCGCG
AAAAACTGATTCAGAGAATTTACCGCGGGATCGAGCCGACTTTGCCAAACTGGTTCGCGG
TCACAAAGACCAGAAATGGCGCCGGAGGCGGGAACAAGGTGGTGGATGAGTGCTACATCC
CCAATTACCTGCTCCCCAAAACCCAACCTGAGCTCCAGTGGGCGTGGACTAATATGGAAC
AGTATTTAAGCGCCTGTTTGAATCTCGCGGAGCGTAAACGGTTGGTGGCGCAGCATCTGA
CGCACGTGTCGCAGACGCAGGAGCAGAACAAAGAGAATCAGAATCCCAATTCTGACGCGC
CGGTGATTAGATCAAAAACCTCAGCCAGGTACATGGAGCTGGTCGGGTGGCTCGTGGATA
AGGGGATTACGTCGGAGAAGCAGTGGATCCAGGAGGATCAGGCTTCATACATCTCCTTCA
ATGCGGCCTCCAACTCGCGGTCTCAAATCAAGGCTGCCTTGGACAATGCGGGAAAGATTA
TGAGCCTGACTAAAACCGCCCCCGACTACCTGGTGGGCCAGCAGCCCGTGGAGGACATTT
TCAGCAATCGGATTTATAAAATCTTGGAACTGAACGGGTACGATCCCCAATACGCTGCTT
CCGTCTTTCTGGGATGGGCCACAAAAAAGTTCGGCAAGAGGAACACCATCTGGCTGTTTG
GGCCTGCAACTACCGGGAAGACCAACATCGCGGAGGCCATAGCCCACACTGTACCCTTCT
ACGGGTGTGTAAACTGGACCAATGAGAACTTTCCCTTCAACGACTGCGTCGACAAGATGG
TGATCTGGTGGGAGGAGGGGAAGATGACCGCCAAGGTCGTGGAGTCGGCCAAAGCCATTC
TCGGCGGAAGCAAGGTGCGCGTGGACCAAAAATGCAAGTCCTCGGCCCAGATCGACCCGA
CTCCCGTGATCGTCACTTCCAACACCAACATGTGCGCCGTGATTGACGGGAACTCAACGA
CCTTCGAACACCAGCAGCCGTTGCAAGACCGGATGTTCAAATTTGAACTCACCCGCCGTC
TGGATCATGACTTTGGGAAGGTCACCAAGCAGGAAGTCAAAGACTTTTTCCGGTGGGCAA
AGGATCACGTGGTTGAGGTGGAGCATGAATTTTACGTCAAAAAGGGTGGAGCCAAAAAAA
GACCCGCCCCCAGTGACGCAGATATAAGTGAGCCCAAACGGGCGCGCGAGTCAGTTGCGC
AGCCATCGACGTCAGACGCGGAAGCTTCGATCAACTACGCGGACAGGTACCAAAACAAAT
GTTCTCGTCACGTGGGCATGAATCTGATGCTGTTTCCCTGCAGACAATGCGAGAGAATGA
ATCAGAATTCAAATATCTGCTTCACTCACGGACAGAAAGACTGTTTAGAGTGCTTTCCCG
TGTCAGAATCTCAACCCGTTTCTGTCGTCAAAAAGGCGTATCAGAAACTTTGCTACATTC
ATCATATCATGGGAAAGGTGCCAGACGCTTGCACTGCCTGCGATCTGGTCAATGTGGATT
TGGATGACTGCATCTCTGAACAATAAATGATTTAAATCAGGTATGGCTGCCGATGGTTAT
CTTCCAGATTGGCTCGAGGACACTCTCTCTGAAGGAATAAGACAGTGGTGGAAGCTCAAA
CCTGGCCCACCACCACCAAAGCCCGCAGAGCGGCATAAGGACGACAGCAGGGGTCTTGTG
CTTCCTGGGTACAAGTACCTCGGACCCTTCAACGGACTCGACAAGGGAGAGCCGGTCAAC
GAGGCAGACGCCGCGGCCCTCGAGCACGACAAGGCCTACGACCGGCAGCTCGACAGCGGA
GACAACCCGTACCTCAAGTACAACCACGCCGACGCGGAGTTTCAGGAGCGCCTTAAAGAA
GATACGTCTTTTGGGGGCAACCTCGGACGAGCAGTCTTCCAGGCGAAAAAGAGGGTTCTT
GAACCTCTGGGCCTGGTTGAGGAACCTGTTAAGACGGCTCCGGGAAAAAAGAGGCCGGTA
GAGCACTCTCCTGTGGAGCCAGACTCCTCCTCGGGAACAGGAAAAGCGGGCAACCAGCCT
GCAAGAAAAAGATTGAATTTCGGTCAGACTGGAGACGCAGACTCCGTACCTGACCCCCAG
CCTCTCGGACAGCCACCAGCAGCCCCCTCTGGTCTGGGAACTAATACGATGGCTTCAGGC
AGTGGCGCACCAATGGCAGACAATAACGAGGGCGCCGACGGAGTGGGTAATTCCTCGGGA
AATTGGCATTGCGATTCCACATGGATGGGCGACAGAGTCATCACCACCAGCACCCGAACC
TGGGCTCTGCCCACCTACAACAACCATCTCTACAAGCAGATTTCCAGCCAATCAGGAGCC
TCAAACGACAACCACTACTTTGGCTACAGCACCCCTTGGGGGTATTTTGACTTCAACAGA
TTCCACTGCCACTTTTCACCACGTGACTGGCAAAGACTCATCAACAACAACTGGGGATTC
CGGCCCAAAAGACTCAACTTCAAGCTTTTTAACATTCAAGTCAAAGAGGTCACGCAGAAT
GACGGTACGACGACGATTGCCAATAACCTTACCAGCACGGTTCAGGTGTTTACTGACTCG
GAGTACCAGCTCCCGTACGTCCTTGGCTCGGCGCATCAAGGATGCCTCCCGCCGTTCCCA
GCAGACGTCTTCATGGTGCCACAGTATGGATACCTCACCCTGAACAACGGGAGTCAGGCA
GTAGGACGCTCTTCATTTTACTGCCTGGAGTACTTTCCTTCTCAAATGCTGCGTACCGGA
AACAACTTTACCTTCAGCTACACCTTTGAGGACGTTCCTTTCCACAGCAGCTACGCTCAC
AGCCAGAGTTTGGACCGTCTCATGAATCCTCTCATCGACCAGTACCTGTATTACTTGAGC
AGAACAAACACTCCAAGCGGAACCACCACGCAGTCCAGGCTTCAGTTTTCTCAGGCCGGA
GCGAGTGACATTCGGGACCAGTCTAGGAACTGGCTTCCTGGACCCTGTTACCGCCAGCAG
CGAGTATCAAAGACAGCTGCGGACAACAACAACAGTGAGTACTCGTGGACTGGAGCTACC
AAGTACCACCTCAATGGAAGAGACTCTCTGGTGAATCCGGGCCCGGCCATGGCCAGCCAC
AAGGACGATGAAGAAAAGTTTTTTCCTCAAAGCGGGGTTCTCATCTTTGGGAAGCAAGGC
TCAGAGAAAACAAATGTGGACATTGAAAAGGTCATGATTACAGACGAAGAGGAAATCAGG
ACCACCAATCCCGTGGCTACGGAGCAGTATGGTGCTGTATCTACCAACCTCCAGAGCGGC
AACACACAAGCAGCTACCTCAGATGTCAACACACAAGGTGTTCTTCCAGGCATGGTCTGG
CAGGACAGAGACGTGTACCTGCAGGGGCCCATCTGGGCAAAGATTCCACACACGGACGGA
CATTTTCACCCCTCTCCCCTCATGGGCGGATTTGGATTGAAGCACCCTCCCCCGCAGATT
CTCATCAAGAACACCCCGGTACCTGCGAATCCTTCGACCACCTTCAGTGCAGCAAAGTTT
GCTTCCTTCATCACACAGTATTCCACGGGGCAGGTCAGCGTGGAGATCGAGTGGGAGCTG
CAGAAGGAGAACAGCAAACGCTGGAACCCCGAGATCCAGTACACTTCCAACTATAACAAG
TCTGTTAATGTGGACTTTACTGTGGACACTAATGGCGTGTATTCAGAGCCTCGCCCCATT
GGCACCAGATACCTGACTCGTAATCTGTAATTGCTTGTTAATCAATAAACCGTTTAATTC
GTTTCAGTTGAACTTTGGTCTCTGCGTACTTATTTTTTATCTAGTTTCCATGGCTACGTA
GATAAGTAGCATGGAGGGTTAATCATTATCTATAAGGAACCCCTAGTGATGGAGTTGGCC
ACTCCCTCTCTGCGCGCTCGCTCGCTCACTGAGGCCGGGCGACCAAAGGTCGCCCGACGC
CCGGGCTTTGCCCGGGCGGCCTCAGTGAGCGAGCGAGCGCGCAGAGAGGGAGTGGCCAA
SEQ ID NO: 69
>#2206_AAV.FL.linear [organism = Adeno-associated virus][mol_type = genomic
DNA][isolation_source = liver tissue][topology = linear]
TTGGCCACTCCCTCTCTGCGCGCTCGCTCGCTCACTGAGGCCGGGCGACCAAAGGTCGCC
CGACGCCCGGGCTTTGCCCGGGCGGCCTCAGTGAGCGAGCGAGCGCGCAGAGAGGGAGTG
GCCAACTCCATCACTAGGGGTTCCTGGAGGGGTGGAGTCGTGACGTGAAGTACGTCATAG
GGTTAGGGAGGTCCTGTATTAGAGGTCACGTGAGTGTTTTGCGACATTTTGCGACACCAT
GTGGTCACGCTTGGTATTTAAGCCCGAGTGAGCACGCAGGGTCTCCATTTTGAAGCGGGA
GGTTTGAACGCGCAGCCGCCATGCCGGGATTTTACGAGATTGTGATTAAGGTCCCCAGCG
ACCTTGACGAGCATCTGCCCGGTATTTCTGACAGCTTTGTGAACTGGGTGGCCGAGAAGG
AATGGGAGTTGCCGCCAGATTCTGACATGGATCTGAATCTGATTGAGCAGGCACCCCTGA
CCGTGGCCGAGAAGCTGCAGCGCGACTTTCTGACGGAGTGGCGCCGCGTGAGTAAGGCCC
CGGAGGCCCTCTTCTTTGTGCAATTTGAGAAGGGAGAGAGCTACTTCCACATGCACGTGC
TGGTGGAGACCACCGGGGTGAAATCCATGGTTTTGGGACGTTTCCTGAGTCAGATTCGCG
AAAAACTGATTCAGAGAATTTACCGCGGGATCGAGCCGACTTTGCCAAACTGGTTCGCGG
TCACAAAGACCCGAAATGGCGCCGGAGGCGGGAACAAGGTGGTTGATGAGTGCTACATCC
CCAATTACCTGCTCCCCAAAACCCAGCCTGAGCTCCAGTGGGCGTGGACTAATATGGAAC
AGTATTTAAGCGCCTGTTTGAATCTCGCGGAGCGTAAACGGTTGGTGGCGCAGCATCTGA
CGCACGTGTCGCAGACGCAGGAGCAGAACAAAGAGAATCAGAATCCCAATTCTGACGCGC
CGGTGATTAGATCAAAAACCTCAGCCAGGTACATGGAGCTGGTCGGGTGGCTCGTGGATA
AGGGGATTACCTCGGAGAAGCAGTGGATCCAGGAGGACCAGGCTTCATACATCTCCTTCA
ATGCGGCCTCCAACTCGCGGTCCCAAATCAAGGCTGCTCTGGACAATGCGGGAAAAATCA
TGAGCCTGACTAAAACCGCCCCCGACTACCTGGTGGGCCAGCAGCCCGTGGAGGACATTT
CCAGCAATCGGATTTATAAAATCTTGGAACTGAACGGGTACGATCCCCAATATGCGGCTT
CCGTCTTTCTGGGATGGGCCACGAAAAAGTTCGGCAAGAGGAACACCATCTGGCTGTTTG
GGCCTGCAACTACCGGGAAGACCAACATCGCGGAGGCCATAGCCCACACTGTGCCCTTCT
ACGGGTGCGTAAACTGGACCAATGAGAACTTTCCCTTCAACGACTGCGTCGACAAGATGG
TGATCTGGTGGGAGGAGGGAAAGATGACCGCCAAGGTCGTGGAGTCGGCCAAAGCCATTC
TCGGAGGAAGCAAGGTGCGCGTGGACCAGAAATGCAAGTCCTCGGCCCAGATAGACCCGA
CTCCCGTGATCGTCACTTCCAACACCAACATGTGCGCCGTGATTGACGGGAACTCAACGA
CCTTCGAACACCAGCAGCCGTTGCAAGACCGGATGTGCAAATTTGAACTCACCCGCCGTC
TGGATCATGACTTTGGGAAGGTCACCAAGCAGGAAGTCAAAGACTTTTTCCGGTGGGCAA
AGGATCACGTGGTTGAGGTGGAGCATGAATTCTACGTCAAAAAGGGTGGAGCCAAGAAAA
GACCCGCCCCCAGTGACGCAGATATAAGTGAGCCCAAACGGGCGCGCGAGTCAGTTGCGC
AGCCATCGACGTCAGACGCGGAAGCTTCGATCAACTACGCGGACAGGTACCAAAACAAAT
GTTCTCGTCACGTGGGCATGAATCTGATGCTGTTTCCCTGCAGACAATGCGAGAGAATGA
ATCAGAATTCAAATATCTGCTTCACTCACGGACAGAAAGACTGTTTAGAGTGCTTTCCCG
TGTCAGAATCTCAACCCGTTTCTGTCGTCAAAAAGGCGTATCAGAAACTTTGCTACATTC
ATCATATCATGGGAAAGGTGCCAGACGCTTGCACTGCCTGCGATCTGGTCAATGTGGATT
TGGATGACTGCATCTCTGAACAATAAATGATTTAAATCAGGTATGGCTGCCGATGGTTAT
CTTCCAGATTGGCTCGAGGACACTCTCTCTGAAGGAATAAGACAGTGGTGGAAGCTCAAA
CCTGGCCCACCACCACCAAAGCCCGCAGAGCGGCATAAGGACGACAGCAGGGGTCTTGTG
CTTCCTGGGTACAAGTACCTTGGACCCTTCAACGGACTCGACAAGGGAGAGCCGGTCAAC
GAGGCAGACGCCGCGGCCCTCGAGCACGACAAGGCCTACGACCGGCAGCTCGACAGCGGA
GACAACCCGTACCTCAAGTACAACCACGCCGACGCGGAGTTTCAGGAGCGCCTTAAAGAA
GATACGTCTTTTGGGGGCAACCTCGGACGAGCAGTCTTCCAGGCGAAAAAGAGGGTTCTT
GAACCTCTGGGCCTGGTTGAGGAACCTGTTAAGACGGCTCCGGGAAAAAAGAGGCCGGTA
GAGCACTCTCCTGCGGAGCCAGACTCCTCCTCGGGAACCGGAAAAGCGGGCAACCAGCCT
GCAAGAAAAAGACTGAATTTCGGTCAGACTGGAGACGCAGACTCCGTACCTGACCCCCAG
CCTCTCGGACAGCCACCAGCAGCCCCCTCTGGTCTGGGAACTAATACGATGGCTTCAGGC
AGTGGCGCACCAATGGCAGACAATAACGAGGGCGCCGACGGAGTGGGTAATTCCTCGGGA
AATTGGCATTGCGATTCCACATGGATGGGCGACAGAGTCATCACCACCAGCACCCGAACC
TGGGCCCTGCCCACCTACAACAACCATCTCTACAAGCAGATTTCCAGCCAATCAGGAGCT
TCAAACGACAACCACTACTTTGGCTACAGCACCCCCTGGGGGTATTTTGACTTCAACAGA
TTCCACTGCCACTTCTCGCCACGTGACTGGCAGAGACTCATCAACAACAACTGGGGATTC
CGACCCAAGAGACTCAACTTCAAGCTCTTTAACATTCAAGTCAAAGAGGTCACGCAGAAT
GACGGTACGACGACGATTGCCAATAACCTTACCAGCACGGTTCAGGTGTTTACTGACTCG
GAGTACCAGCTCCCGTACGTCCTCGGCTCGGCGCATCAAGGATGCCTCCCGCCGTTCCCA
GCAGACGTCTTCATGGTGCCACAGTATGGATACCTCACCCTGAACAACGGGAGTCAGGCA
GTAGGACGCTCTTCATTTTACTGCCTGGAGTACTTTCCTTCTCAGATGCTGCGTACCGGA
AACAACTTTACCTTCAGCTACACCTTTGAGGACGTTCCTTTCCACAGCAGCTACGCTCAC
AGCCAGAGTTTGGACCGTCTCATGAATCCTCTCATCGACCAGTACCTGTATTACTTGAGC
AGAACAAACACGCCAAGCGGAACCACCACGCAGTCCAGACTTCAGTTTTCTCAGGCCGGA
GCAAGTGACATTCGGGACCAGTCTAGGAACTGGCTTCCTGGACCCTGTTACCGCCAGCAG
CGAGTATCAAAGACATCTGCGGATAACAACAACAGTGAATACTCGTGGACTGGAGCTACC
AAGTACCACCTCAATGGCAGAGACTCTCTGGTGAATCCGGGCCCGGCCATGGCCAGCCAC
AAGGACGATGAAGAAAAGTTTTTTCCTCAAAGCGGGGTTCTCATCTTTGGAAAACAAGGC
TCAGAGAAAACAAATGTGGACATTGAAAAGGTCATGATTACAGACGAAGAGGAAATCAGG
ACCACCAATCCCGTGGCTACGGAGCAGTATGGTGCTGTATCTACCAACCTCCAGAGCGGC
AACACACAAGCAGCTACCTCAGATGTCAACACACAAGGCGTTCTTCCAGGCATGGTCTGG
CAGGACAGAGACGTGTACCTGCAGGGGCCCATCTGGGCAAAGATTCCACACACAGACGGA
CATTTTCACCCCTCTCCCCTCATGGGCGGATTTGGATTAAAGCACCCTCCCCCGCAAATT
CTCATTAAGAATACCCCGGTACCTGCAAATCCTTCTACCACTTTCAGCGCGGCAAAGTTT
GCTTCTTTCATCACACAGTACTCCACGGGGCAGGTCAGCGTGGAGATCGAGTGGGAGCTG
CAGAAGGAGAACAGCAAACGCTGGAATCCCGAGATTCAATACACTTCCAACTACAACAAA
TCTGTTAATGTGGACTTTACTGTGGACACTAATGGTGTGTATTCAGAGCCTCGCCCCATT
GGCACCAGATACCTGACTCGTAATCTGTAATTGCTTGTTAATCAATAAACCGTTTAATTC
GTTTCAGTTGAACTTTGGTCTCTGTGTACTTCTTTCTTATCTAGTTTCCATGGCTACGTA
GATAAGTACCATGGATGGTTAATCATTAACTATAAGGAACCCCTAGTGATGGAGTTGGCC
ACTCCCTCTCTGCGCGCTCGCTCGCTCACTGAGGCCGGGCGACCAAAGGTCGCCCGACGC
CCGGGCTTTGCCCGGGCGGCCTCAGTGAGCGAGCGAGCGCGCAGAGAGGGAGTGGCCAA
SEQ ID NO: 70
>#877_AAV.FL.linear [organism = Adeno-associated virus][mol_type = genomic DNA]
[isolation_source = liver tissue][topology = linear]
TTGGCCACTCCCTCTCTGCGCGCTCGCTCGCTCACTGAGGCCGGGCGACCAAAGGTCGCC
CGACGTCCGACCTTTGGTCGCCCGGCCTCAGTGAGCGAGCGAGCGCGCAGAGAGGGAGTG
GCCAACTCCATCACTAGGGGTTCCTGGAGGGGTGGAGTCGTGACGTGAAGTACGTCATAG
GGTTAGGGAGGTCCTGTATTAGAGGTCACGTGAGTGTTTTGCGACATTTTGCGACACCAT
GTGGCCACGCTGGGTATTTAAGCCCGAGTGAGCACGCAGGGTCTCCATTTTGAAGCGGGA
GGTTTGAACGCGCAGCCGCCATGCCGGGGTTTTACGAGATTGTGATTAAGGTCCCCAGCG
ACCTTGACGAGCATTTGCCCGGCATTTCTGACAGCTTTGTGAACTGGGTGGCCGAGAAGG
AATGGGAGTTGCCGCCAGATTCTGACATGGATCTGAATTTGATTGAGCAGGCACCCCTGA
CCGTGGCCGAGAAGCTGCAGCGCGACTTTCTGACGGAGTGGCGCCGCGTGAGTAAGGCCC
CGGAGGCCCTCTTCTTTGTGCAATTTGAGAAGGGAGAGAGCTACTTCCACATGCACGTGC
TGGTGGAGACTACCGGGGTGAAATCCATGGTTTTGGGACGTTTCCTGAGTCAGATTCGCG
AAAAACTGATTCAGAGAATTTACCGCGGGATCGAGCCGACTTTGCCAAACTGGTTCGCGG
TCACAAAGACCCGAAATGGCGCCGGAGGCGGGAACAAGGTGGTGGATGAGTGCTACATCC
CCAATTACCTGCTCCCCAAAACCCAGCCTGAGCTCCAGTGGGCGTGGACTAATATGGAAC
AGTATTTAAGCGCCTGTTTGAATCTCGCGGAGCGTAAACGGTTGGTGGCGCAGCATCTGA
CGCACGTGTCGCAGACGCAGGAGCAGAACAAAGAGAATCAGAATCCCAATTCTGACGCGC
CGGTGATTAGATCAAAAACCTCAGCCAGGTACATGGAGCTGGTCGGGTGGCTCGTGGACA
AGGGGATTACCTCTGAGAAGCAGTGGATCCAGGAGGACCAGGCCTCATACATCTCCTTCA
ATGCGGCCTCCAACTCGCGGTCCCAGATCAAGGCTGCTCTGGACAATGCGGGAAAGATCA
TGAGCCTGACTAAAACCGCCCCCGACTACCTGGTGGGCCAGCAGCCCGTGGAGGACATTT
CCAGCAATCGGATTTATAAAATCTTGGAACTGAACGGGTACGATCCCCAATATGCGGCTT
CCGTCTTTCTGGGATGGGCCACGAAAAAGTTCGGCAAGAGGAACACCATCTGGCTGTTTG
GGCCTGCAACTACCGGGAAGACCAACATCGCAGAGGCCATAGCCCACACTGTGCCCTTCT
ACGGGTGCGTAAACTGGACCAATGAGAACTTTCCATTCAACGACTGTGTCGACAAGATGG
TGATCTGGTGGGAGGAGGGAAAGATGACCGCCAAGGTTGTGGAGTCGGCCAAAGCTATTC
TCGGAGGAAGCAAGGTGCGCGTGGACCAGAAATGCAAGTCCTCGGCCCAGATAGACCCGA
CTCCCGTGATCGTCACCTCCAACACCAACATGTGCGCCGTGATTGACGGGAACTCAACGA
CCTTTGAGCACCAGCAGCCGTTGCAAGACCGGATGTTCAAATTTGAACTCACCCGCCGTC
TGGATCATGACTTTGGGAAGGTCACCAAGCAGGAAGTCAAAGACTTTTTCCGGTGGGCAA
AGGATCACGTGGTTGAGGTGGAGCATGAATTCTACGTCAAAAAGGGTGGAGCCAAGAAAA
GACCCGCCCCCAGTGACGCAGATATAAGTGAGCCCAAACGGGCGCGCGAGTCAGTTGCGC
AGCCATCGACGTCAGACGCGGAAGCTTCGATCAACTACGCGGACAGGTACCAAAACAAAT
GTTCTCGTCACGTGGGCATGAATCTGATGCTGTTTCCCTGCAGACAATGCGAGAGAATGA
ATCAGAATTCAAATATCTGCTTCACTCACGGACAGAAAGACTGTTTAGAGTGCTTTCCCG
TGTCAGAATCTCAACCCGTTTCTGTCGTCAAAAAGGCGTATCAGAAACTGTGCTACATTC
ATCACATCATGGGAAAGGTGCCAGACGCTTGCACTGCCTGCAATCTGGTCAATGTGGATT
TGGATGACTGCATCTCTGAACAATAAATGATTTAAATCAGGTATGGCTGCCGATGGTTAT
CTTCCAGATTGGCTCGAGGACACTCTCTCTGAAGGAATAAGACAGTGGTGGAAGCTCAAA
CCTGGCCCACCACCACCAAAGCCCGCAGAGCGGCATAAGGACGACAGCAGGGGTCTTGTG
CTTCCTGGGTACAAGTACCTCGGACCCTTCAACGGACTCGACAAGGGAGAGCCGGTCAAC
GAGGCAGACGCCGCGGCCCTCGAGCACGACAAGGCCTACGACCGGCAGCTCGACAGCGGA
GACAACCCGTACCTCAAGTACAACCACGCCGACGCGGAGTTTCAGGAGCGCCTTAAAGAA
GATACGTCTTTTGGGGGCAACCTCGGACGAGCAGTCTTCCAGGCAAAAAAGAGGGTTCTT
GAACCTCTGGGCCTGGTTGAGGAACCTGTTAAGACGGCTCCGGGAAAAAAGAGGCCGGTA
GAGCACTCTCCTGCGGAGCCAGACTCCTCCTCGGGAACCGGAAAGGCGGGCAACCAGCCT
GCAAGAAAAAGATTGAATTTCGGTCAGACTGGAGACGCAGACTCCGTACCTGACCCCCAG
CCTCTCGGACAGCCACCAGCAGCCCCCTCTGGTCTGGGAACTAATACGATGGCTACAGGC
AGTGGCGCACCAATGGCAGACAATAACGAGGGCGCCGACGGAGTGGGTAATTCCTCGGGA
AATTGGCATTGCGATTCCACATGGATGGGCGACAGAGTCATCACCACCAGCACCCGCACC
TGGGCTCTGCCCACCTACAACAACCATCTGTACAAGCAGATTTCCAGCCAATCAGGAGCC
TCAAACGACAACCACTACTTTGGCTACAGCACCCCCTGGGGGTATTTTGACTTCAACAGA
TTCCACTGCCACTTTTCACCACGTGACTGGCAAAGACTCATCAACAACAACTGGGGATTC
CGGCCCAAGAGACTCAACTTCAAGCTCTTTAACATTCAAGTCAAGGAGGTCACGCAGAAT
GACGGTACGACGACGATTGCCAATAACCTTACCAGCACGGTTCAGGTGTTTACTGACTCG
GAGTACCAGCTCCCGTACGTCCTCGGCTCGGCGCATCAAGGATGCCTCCCGCCGTTCCCA
GCAGACGTCTTCATGGTGCCACAGTATGGATACCTCACCCTGAACAACGGGAGTCAGGCA
GTAGGACGCTCTTCATTTTACTGCCTGGAGTACTTTCCTTCTCAGATGCTTCGTACCGGA
AACAACTTTACCTTCAGCTACACCTTTGAAGACGTGCCTTTCCACAGCAGCTACGCTCAC
AGTCAAAGTCTGGACCGTCTCATGAATCCTCTCATCGACCAGTACCTGTATTACTTGAGC
AGAACAAACACTCCAAGCGGAACCACTACGCAGTCCAGGCTTCAGTTTTCTCAGGCCGGA
GCGAGTGACATTCGGGACCAGTCTAGGAACTGGCTTCCTGGACCCTGTTACCGCCAGCAG
CGAGTATCAAAGACAGCTGCGGACAACAACAACAGTGAATACTCGTGGACTGGAGCTACC
AAGTACCACCTCAATGGCAGAGACTCTCTGGTGAATCCGGGCCCGGCCATGGCCAGCCAC
AAGGACGATGAAGAAAAGTTTTTTCCTCAAAGCGGGGTTCTCATCTTTGGGAAGCAAGGC
TCAGAGAAAACAAATGTGGACATTGAAAAGGTCATGATTACAGACGAAGAGGAAATCAGG
ACCACCAATCCCGTGGCTACGGAGCAGTATGGTTCTGTATCTACCAACCTCCAGAGCGGC
AACACACAAGCAGCTACCGCAGATGTCAACACACAAGGCGTTCTTCCAGGCATGGTCTGG
CAGGACAGAGACGTGTACCTGCAGGGGCCTATCTGGGCAAAGATTCCACACACGGACGGA
CATTTTCACCCCTCTCCCCTCATGGGCGGATTTGGACTGAAGCACCCTCCTCCACAGATT
CTCATCAAGAACACCCCGGTACCTGCGAATCCTTCTACCACTTTCAGTGCGGCAAAATTT
GCTTCTTTCATCACACAGTACTCCACGGGGCAGGTCAGCGTGGAGATCGAGTGGGAGCTG
CAGAAGGAGAACAGCAAACGCTGGAATCCCGAGATTCAGTACACTTCAAACTACAACAAG
TCTGTTAATGTGGACTTTACTGTGGACACTAATGGCGTGTATTCAGAGCCTCGCCCCATT
GGCACCAGATACCTGACTCGTAATCTGTAATTGCTTGTTAATCAATAAACCGTTTAATTC
GTTTCAGTTGAACTTTGGTCTCTGCGTACTTCTTTCTTATCTAGTTTCCATGGCTACGTA
GATAAGTACCATGGAGGGTTAATCATTAACACAAGGAACCCCTAGTGATGGAGTTGGCCA
CTCCCTCTCTGCGCGCTCGCTCGCTCACTGAGGCCGGGCGACCAAAGGTCGCCCGACGCC
CGGGCTTTGCCCGGGCGGCCTCAGTGAGCGAGCGAGCGCGCAGAGAGGGAGTGGCCAA
SEQ ID NO: 71
>#1534_AAV.FL.linear [organism = Adeno-associated virus][mol_type = genomic
DNA][isolation_source = liver tissue][topology = linear]
TTGGCCACTCCCTCTCTGCGCGCTCGCTCGCTCACTGAGGCCGCCCGGGCAAAGCCCGGG
CGTCGGGCGACCTTTGGTCGCCCGGCCTCAGTGAGCGAGCGAGCGCGCAGAGAGGGAGTG
GCCAACTCCATCACTAGGGGTTCCTGGAGGGGTGGAGTCGTGACGTGAAGTACGTCATAG
GGTTAGGGAGGTCCTGTATTAGAGGTCACGTGAGTGTTTTGCGACATTTTACGACACCAT
GTGGTCACGCTGGGTATTTAAGCCCGAGTGAGCACGCAGGGTCTCCATTTTGAAGCGGGA
GGTTTGAACGCGCAGCCGCCATGCCGGGGTTTTACGAGATTGTGATTAAGGTCCCCAGCG
ACCTTGACGAGCATCTGCCCGGCATTTCTGACAGCTTTGTGAACTGGGTGGCCGAGAAGG
AATGGGAGTTGCCGCCAGATTCTGACATGGATCTGAATCTGATTGAGCAGGCACCCCTGA
CCGTGGCCGAGAAGCTGCAGCGCGACTTTCTGACGGAATGGCGCCGTGTGAGTAAGGCCC
CGGAGGCCCTCTTCTTTGTGCAATTTGAGAAGGGAGAAAGCTACTTCCACATGCACGTGC
TCGTGGAGACCACCGGGGTGAAATCCATGGTTTTGGGACGTTTCCTGAGTCAGATTCGCG
AAAAACTGATTCAGAGAATTTACCGCGGGATCGAGCCGACTTTGCCAAACTGGTTCGCGG
TCACAAAGACCCGAAATGGCGCCGGAGGCGGGAACAAGGTGGTGGATGAGTGCTACATCC
CCAATTACCTGCTCCCCAAAACCCAGCCTGAGCTCCAGTGGGCGTGGACTAATATGGAAC
AGTATTTAAGCGCCTGTTTGAATCTCGCGGAGCGTAAACGGTTGGTGGCGCAGCATCTGA
CGCACGTGTCGCAGACGCAGGAGCAGAACAAAGAGAATCAGAATCCCAATTCTGACGCGC
CGGTGATTAGATCAAAAACCTCAGCCAGGTACATGGAGCTGGTCGGGTGGCTCGTGGACA
AAGGGATTACCTCGGAGAAGCAGTGGATCCAGGAGGACCAGGCCTCATACATCTCCTTCA
ATGCGGCCTCCAACTCGCGGTCCCAGATCAAGGCTGCTCTGGACAATGCGGGAAAAATCA
TGAGCCTGACTAAAACCGCCCCCGACTACCTGGTGGGCCAGCAGCCCGTGGAGGACATTT
CCAGCAATCGGATTTATAAAATCTTGGAACTGAACGGGTACGATCCCCAATACGCGGCTT
CCGTATTTCTGGGATGGGCCACGAAAAAGTTCGGCAAGAGGAACACCATCTGGCTGTTTG
GGCCTGCAACTACCGGGAAGACCAACATCGCGGAGGCCATAGCCCACACTGTGCCCTTCT
ACGGGTGCGTAAACTGGACCAATGAGAACTTTCCATTCAATGACTGCGTCGACAAGATGG
TGATCTGGTGGGAGGAGGGAAAGATGACCGCCAAGGTCGTGGAGTCGGCCAAAGCCATTC
TCGGAGGAAGCAAGGTGCGCGTGGACCAGAAATGCAAGTCCTCGGCCCAGATAGACCCGA
CTCCCGTGATCGTCACCTCCAACACCAACATGTGCGCCGTGATTGACGGGAACTCAACGA
CCTTCGAGCACCAGCAGCCGTTGCAAGACCGGATGTTCAAATTTGAACTCACCCGCCGTC
TGGATCATGACTTTGGGAAGGTCACCAAGCAGGAAGTCAAAGACTTTTTCCGGTGGGCAA
AGGATCACGTGGTTGAGGTGGAGCATGAATTCTACGTCAAAAAGGGTGGAGCCAAGAAAA
GACCCGCCCCCAGTGACGCAGATATAAGTGAGCCCAAACGGGTGCGCGAGTCAGTTGCGC
AGCCATCGACGTCAGACGCGGAAGCTTCGATCAACTACGCGGACAGGTACCAAAACAAAT
GTTCTCGTCACGTGGGCATGAATCTGATGCTGTTTCCCTGCAGACAATGCGAGAGAATGA
ATCAGAATTCAAATATCTGCTTCACTCACGGACAGAAAGACTGTTTAGAGTGCTTTCCCG
TGTCAGAATCTCAACCCGTTTCTGTCGTCAAAAAGGCGTATCAGAAACTTTGCTACATTC
ATCATATCATGGGAAAGGTGCCAGACGCTTGCACTGCCTGCGATCTGGTCAATGTGGATT
TGGATGACTGCATCTCTGAACAATAAATGATTTAAATCAGGTATGGCTGCCGATGGTTAT
CTTCCAGATTGGCTCGAGGACACTCTCTCTGAAGGAATAAGACAGTGGTGGAAGCTCAAA
CCTGGCCCACCACCACCAAAGCCCGCAGAGCGGCATCAGGACGACAGCAGGGGTCTTGTG
CTTCCTGGGTACAAGTACCTCGGACCCTTCAACGGACTCGACAAGGGAGAGCCGGTCAAC
GAGGCAGACGCCGCGGCCCTCGAGCACGACAAGGCCTACGACCGGCAGCTCGACAGCGGA
GACAACCCGTACCTCAAGTACAACCACGCCGACGCGGAGTTTCAGGAGCGCCTTAAAGAA
GATACGTCTTTTGGGGGCAACCTCGGACGAGCAGTCTTCCAGGCGAAAAAGAGGGTTCTT
GAACCTCTGGGCCTGGTTGAGGAACCTGTTAAGACGGCTCCGGGAAAAAAGAGGCCGGTA
GAGCACTCTCCTGCGGAGCCAGACTCCTCCTCGGGAACCGGAAAAGCGGGCAACCAGCCT
GCAAGAAAAAGATTGAATTTCGGTCAGACTGGAGACGCAGACTCCGTACCTGACCCCCAG
CCTCTCGGACAGCCACCAGCAGCCCCCTCTGGTCTGGGAACTAATACGATGGCTACAGGC
AGTGGCGCACCAATGGCAGACAATAACGAGGGCGCCGACGGAGTGGGTAATTCCTCGGGA
AATTGGCATTGCGATTCCACATGGATGGGCGACAGAGTCATCACCACCAGCACCCGCACC
TGGGCTCTGCCCACCTACAACAACCATCTGTACAAGCAGATATCCAGCCAGTCTGGAGCC
AGCAACGACAACCACTACTTTGGCTACAGCACCCCCTGGGGGTATTTTGACTTCAACAGA
TTCCACTGCCACTTTTCACCACGTGACTGGCAAAGACTCATCAACAACAACTGGGGATTC
CGACCAAAAAGACTCAACTTCAAGCTCTTTAACATTCAAGTCAAGGAGGTCACGCAGAAT
GACGGTACGACAACGATTGCCAATAACCTTACCAGCACGGTTCAGGTGTTTACTGACTCG
GAGTACCAGCTCCCGTACGTCCTCGGCTCGGCGCATCAAGGATGCCTCCCGCCGTTCCCA
GCAGACGTCTTCATGGTGCCACAGTATGGATACCTCACCCTGAACAACGGGAGTCAGGCA
GTAGGACGCTCTTCATTTTACTGCCTGGAGTACTTTCCTTCTCAGATGCTTCGTACCGGA
AACAACTTTACCTTCAGCTACACCTTTGAAGACGTGCCTTTCCACAGCAGCTACGCTCAC
AGTCAAAGTCTGGACCGTCTCATGAATCCTCTCATCGACCAGTACCTGTATTACTTGAGC
AGAACAAACACTCCAAGCGGAACCACCACGCAGTCCAGGCTTCAGTTTTCTCAGGCCGGA
GCGAGTGACATTCGGGACCAGTCTAGGAACTGGCTTCCTGGACCCTGTTACCGCCAGCAG
CGAGTATCAAAGACAGCTGCGGATAACAACAACAGTGAATATTCGTGGACTGGAGCTACC
AAGTACCACCTCAATGGCAGAGACTCTCTGGTGAATCCGGGCCCGGCCATGGCCAGCCAC
AAGGACGATGAAGAAAAGTTTTTTCCTCAAAGCGGGGTTCTCATCTTTGGGAAGCAAGGC
TCAGAGAAAACAAATGTGGACATTGAAAAGGTCATGATTACAGACGAAGAGGAAATCAGG
ACCACCAATCCCGTGGCTACGGAGCAGTATGGTTCTGTATCTACCAACCTCCAGAGCGGC
AACACACAAGCAGCTACCTCAGATGTCAACACACAAGGCGTTCTTCCAGGCATGGTCTGG
CAGGACAGAGATGTGTACCTGCAGGGGCCTATCTGGGCAAAGATTCCACACACGGACGGA
CATTTTCACCCCTCTCCCCTCATGGGCGGATTTGGACTTAAACACCCTCCTCCACAGATT
CTCATCAAGAACACCCCGGTACCTGCAAATCCTTCGACCACCTTCAGTGCGGCAAAGTTT
GCTTCTTTCATCACACAGTACTCCACGGGGCAGGTCAGCGTGGAGATCGAGTGGGAGCTA
CAGAAGGAGAACAGCAAACGCTGGAATCCCGAGATTCAGTACACTTCCAACTACAACAAA
TCTGTTAATGTGGACTTTACTGTGGACACTAATGGTGTGTATTCAGAGCCTCGCCCCATT
GGCACCAGATACCTGACTCGTAATCTGTAATTGCTTGTTAATCAATAAACCGTTTAATTC
GTTTCAGTTAAACTTTGGTCTCCGCGTACTTCTTTTCTTATCTAGTTTCCATGGCTACGT
AGATAAGTACCATGGCGGGTTAATCATTAACTCTAAGGAACCCCTAGTGATGGAGTTGGC
CACTCCCTCTCTGCGCGCTCGCTCGCTCACTGAGGCCGGGCGACCAAAGGTCGCCCGACG
CCCGGGCTTTGCCCGGGCGGCCTCAGTGAGCGAGCGAGCGCGCAGACTGAAACGAATTAA
SEQ ID NO: 72
>#2557_AAV.FL.linear [organism = Adeno-associated virus][mol_type = genomic
DNA][isolation_source = liver tissue][topology = linear]
TTGGCCACTCCCTCTCTGCGCGCTCGCTCGCTCACTGAGGCCGGGCGACCAAAGGTCGCC
CGACGCCCGGGCTTTGCCCGGGCGGCCTCAGTGAGCGAGCGAGCGCGCAGAGAGGGAGTG
GCCAACTCCATCACTAGGGGTTCCTGGAGGGGTGGAGTCGTGACGTGAATTACGTCATAG
GGTTAGGGAGGTCCTGTATTAGAGGTCACGTGAGTGTTTTGCGACATTTTGCGACACCAT
GTGGTCACGCTGGGTATTTAAGCCCGAGTGAGCACGCAGGGTCTCSATTTTGAAGCGGGA
GGTTTGAACGCGCAGCCGCCATGCCGGGATTTTACGAGATTGTGATTAAGGTCCCCAGCG
ACCTTGACGAGCATCTACCCGGCATTTCTGACAGCTTTGTGAACTGGGTAGCCGAGAAGG
AATGGGAGTTGCCGCCAGATTCTGACATGGATCTGAATCTGATTGAGCAGGCACCCCTGA
CCGTGGCCGAGAAGCTGCAGCGCGACTTTCTGACGGAGTGGYGCCGCGTGAGTAAGGCCC
CGGAGGCCCTCTTCTTTGTGCAATTTGAGAAGGGAGAGAGCTACTTCCACATGCACGTGC
TGGTGGAGACAACCGGGGTGAAATCCATGGTTTTGGGACGTTTCCTGAGTCAGATTCGCG
AAAAACTGATTCAGAGAATCTACCGCGGGATCGAGCCGACTTTGCCAAACTGGTTCGCGG
TCACAAAGACCCGAAATGGCGCCGGAGGCGGGAACAAGGTGGTGGATGAGTGCTACATCC
CCAATTACCTGCTCCCCAAAACCCAGCCTGAGCTCCAGTGGGCGTGGACTAATATGGAAC
GGTATTTAAGCGCCTGTTTGAATCTCGCGGAGCGTAAACGGTTGGTGGCGCAGCATCTGA
CGCACGTGTCGCAGACGCAGGAGCAGAACAAAGAGAATCAGAATCCCAATTCTGACGCGC
CGGTGATTAGATCAAAAACCTCAGCCAGRTACATGGAGCTGGTCGGGTGGCTCGTGGATA
AGGGGATTACCTCGGAGAAGCAGTGGATCCAGGAGGACCAGGCTTCATACATCTCCTTCA
ATGCGGCCTCCAACTCGAGGTCCCAAATCAAGGCTGCCTTGGACAATGCGGGGAAGATTA
TGAGCCTGACTAAAACCGCCCCCGACTACCTGGTGGGCCAGCAGCCCGTGGAGGACATTT
CCAGCAATCGGATTTATAAAATCTTGGAACTGAACGGGTACGATCCCCAATATGCGGCTT
CCGTCTTCTTGGGATGGGCTACGAAAAAGTTCGGCAAGAGGAACACCATCTGGCTGTTTG
GGCCTGCAACTACCGGGAAGACCAACATCGCGGAGGCCATAGCCCACACTGTTCCCTTCT
ACGGGTGCGTAAACTGGACCAATGAGAACTTTCCCTTCAACGACTGTGTCGACAAGATGG
TGATCTGGTGGGAGGAGGGGAAGATGACCGCCAAGGTCGTGGAGTCGGCCAAAGCCATTC
TCGGAGGAAGCAAAGTGCGTGTGGACCAGAAATGCAAGTCCTCGGCCCAGATAGACCCGA
CTCCCGTGATCGTCACCTCCAACACCAACATGTGCGCCGTGATTGACGGGAACTCAACGA
CCTTCGAACACCAGCAGCCGTTGCAAGACCGGATGTTCAAATTTGAACTCACCCGCCGTC
TGGATCATGACTTTCCCGTGGCCACCAAGCAGGAAGTCAAAGATTTTTTCCGGTGGGCAA
AGGATCACGTGGTTGAGGTGGAGCATGAATTCTACGTCAAAAAGGGTGGAGCCAAGAAAA
GACCCGCCCCCAGTGACGCAGATATAAGTGAGCCCAAACGGGCGCGCGAGTCAGTTGCGC
AGCCATCGACGTCAGACGCGGAAGCTTCGATCAACTACGCGGACAGGTACCAAAACAAAT
GTTCTCGTCACGTGGGCATGAATCTGATGCTGTTTCCCTGCAGACAATGCGAGAGAATGA
ATCAGAATTCAAATATCTGCTTCACTCACGGACAGAAAGACTGTTTAGAGTGCTTTCCCG
TGTCAGAATCTCAACCCGTTTCTGTCGTCAAAAAGGCGTATCAGAAACTGTGCTACATYC
ATCATATCATGGGAAAGGTGCCAGACGCTTGCACTGCCTGCGATCTGGTCAATGTGGATT
TGGATGACTGCATCTCTGAACAATAAATGATTTAAATCAGGTATGGCTGCCGATGGTTAT
CTTCCAGATTGGCTCGAGGACACTCTCTCTGAAGGAATAAGACAGTGGTGGAAGCTCAAA
CCTGGCCCACCACCACCAAAGCCCGCAGAGCGGCATAAGGACGACAGCAGGGGTCTTGTG
CTTCCTGGGTACAAGTACCTCGGACCCTTCAACGGACTCGACAAGGGAGAGCCGGTCAAC
GAGGCAGACGCCGCGGCCCTCGAACACGACAAGGCCTACGACCGGCAGCTCGACAGCGGA
GACAACCCGTACCTCAAGTACAACCACGCCGACGCGGAGTTTCAGGAGCGCCTTAAAGAA
GATACGTCTTTTGGGGGCAACCTCGGACGAGCAGTCTTCCAGGCCAAAAAGAGGGTTCTT
GAACCTCTGGGCCTGGTTGAGGAGCCTGTTAAGACGGCTCCGGGAAAAAAGAGGCCAGTA
GAGCACTCTCCTGCGGAGCCAGACTCCTCCTCGGGAACCGGAAAAGCGGGCAACCAGCCT
GCAAGAAAGAGATTGAATTTCGGTCAGACTGGAGACGCAGACTCCGTACCTGACCCCCAG
CCTCTCGGACAGCCACCAGCAGCCCCCTCTGGTCTGGGAACTAATACGATGGCTACAGGC
AGTGGCGCACCAATGGCAGACAATAACGAGGGCGCCGACGGAGTGGGTAATTCCTCGGGA
AATTGGCATTGCGATTCCACATGGATGGGCGACAGAGTCATCACCACCAGCACCCGAACC
TGGGCCCTGCCCACCTACAACAACCACCTCTACAAGCAGATTTCCAGCCAGTCTGGAGCC
AGCAACGACAACCACTACTTTGGCTACAGCACCCCCTGGGGGTATTTTGACTTCAACAGA
TTCCACTGCCACTTTTCACCACGTGACTGGCAAAGACTCATCAACAACAACTGGGGATTC
CGACCAAAAAGACTCAACTTCAAGCTCTTTAACATTCAAGTCAAGGAGGTCACGCAGAAT
GACGGTACGACGACGATTGCCAATAACCTTACCAGCACGGTTCAGGTGTTTACTGACTCG
GAGTACCAGCTCCCGTACGTCCTCGGCTCGGCGCATCAAGGATGCCTCCCGCCGTTCCCA
GCAGACGTCTTCATGGTGCCACAGTATGGATACCTCACCCTGAACAACGGGAGTCAGGCA
GTAGGACGCTCTTCATTTTACTGCCTGGAGTACTTTCCTTCTCAGATGCTTCGTACCGGA
AACAACTTTACCTTCAGCTACACCTTTGAAGACGTGCCTTTCCACAGCAGCTACGCTCAC
AGTCAAAGTCTGGACCGTCTCATGAATCCTCTCATCGACCAGTACCTGTATTACTTGAGC
AGAACAAACACTCCAAGCGGAACCACTACGCAGTCCAGGCTTCAGTTTTCTCAGGCCGGA
GCGAGTGACATTCGGGACCAGTCTAGGAACTGGCTTCCTGGACCCTGTTACCGCCAGCAG
CGAGTATCAAAGACAGCTGCGGACAACAACAACAGTGAATACTCGTGGACTGGAGCTACC
AAGTACCACCTCAATGGCAGAGACTCTCTGGTGAATCCGGGCCCGGCCATGGCCAGCCAC
AAGGACGATGAAGAAAAGTTTTTTCCTCAAAGCGGGGTTCTCATCTTTGGGAAGCAAGGC
TCAGAGAAAACAAATGTGGACATTGAAAAGGTCATGATTACAGACGAAGAGGAAATCAGG
ACCACCAATCCCGTGGCTACGGAGCAGTATGGTTCTGTATCTACCAACCTCCAGAGCGGC
AACACACAAGCAGCTACCGCAGATGTCAACACACAAGGCGTTCTTCCAGGCATGGTATGG
CAGGACAGAGACGTGTACCTGCAGGGGCCTATCTGGGCAAAGATTCCACACACGGACGGA
CATTTTCACCCCTCTCCCCTCATGGGCGGATTTGGACTTAAACACCCTCCTCCACAGATT
CTCATCAAGAACACCCCGGTACCTGCAAATCCTTCGACCACCTTCAGTGCGGCAAAGTTT
GCTTCTTTCATCACACAGTACTCCACGGGGCAGGTCAGTGTGGAGATTGAGTGGGAGCTG
CAGAAGGAGAACAGCAAACGCTGGAATCCCGAGATCCAGTACACTTCCAACTACAACAAR
TCTGTTAATGCGGACCTTACTGTGGACACTAATGGTGTGTATTCAGAGCCTCGCCCCATT
GGCACCAGATACCTGACTCGTAATCTGTAATTGCTTGTTAATCAATAAACCGTTTAATTC
GTTTCAGTTGAACTTTGGTCTCTGCGTGCTTCTTTCTTATCTAGTTTACATGGCTACGTA
GATAAGTAGCATGGCGGGTTAATCATTAACTACAAGGAACCCCTAGTGATGGAGTTGGCC
ACTCCCTCTCTGCGCGCTCGCTCGCTCACTGAGGCCGGGCGACCAAAGGTCGCCCGACGC
CCGGGCTTTGCCCGGGCGGCCTCAGTGAGCGAGCGAGCGCGCAGAGAGGGAGTGGCCAA
SEQ ID NO: 73
>#1919_AAV.FL.linear [organism = Adeno-associated virus][mol_type = genomic
DNA][isolation_source = liver tissue][topology = linear]
TTGGCCACTCCCTCTCTGCGCGCTCGCTCGCTCACTGAGGCCGGGCGACCAAAGGCCCTT
TCCCCCACACCCTTTGCCCGGGCGGCCTCAGTGAGCGAGCGAGCGCGCAGAGAGGGAGTG
GCCAACTCCATCACTAGGGGTTCCTGGAGGGGTGGAGTCGTGACGTGAAGTACGTCATAG
GGTTAGGGAGGTCCTGTATTAGAGGTCACGTGAGTGTTTTGCGACATTTTGCGACACCAT
GTGGTCACGCTGGGTATTTAAGCCCGAGTGAGCACGCAGGGTCTCCATTTTGAAGCGGGA
GGTTTGAACGCGCAGCCGCCATGCCGGGGTTTTACGAGATTGTGATCAAGGTCCCCAGCG
ACCTTGACGAGCATCTGCCCGGCATTTCTGACAGCTTTGTGAACTGGGTGGCCGAGAAGG
AATGGGAGTTGCCGCCAGATTCTGACATGGATCTGAATCTGATTGAGCAGGCACCCCTGA
CCGTGGCCGAGAAGCTGCAGCGCGACTTTCTGACGGAGTGGCGCCGTGTGAGTAAGGCCC
CGGAGGCCCTCTTCTTTGTGCAATTTGAGAAGGGAGAGAGCTACTTCCACATGCACGTGC
TTGTGGAGACCACCGGGGTGAAATCCATGGTTTTGGGACGTTTCCTGAGTCAGATTCGCG
AAAAACTGATTCAGAGAATTTACCGCGGGATCGAGCCGACTTTGCCAAACTGGTTTGCGG
TCACAAAGACCCGAAATGGCGCCGGAGGCGGGAACAAGGTGGTGGATGAGTGCTACATCC
CCAATTACCTGCTCCCCAAAACCCAGCCTGAGCTCCAGTGGGCGTGGACTAATATGGAAC
AGTATTTAAGCGCCTGTTTGAATCTCGCGGAGCGTAAACGGTTGGTGGCGCAGCATCTGA
CGCACGTGTCGCAGACGCAGGAGCAGAACAAAGAGAATCAGAATCCCAATTCTGACGCGC
CGGTAATTAGATCAAAAACCTCAGCCAGGTACATGGAGCTGGTTGGGTGGCTCGTGGATA
AGGGGATTACCTCGGAGAAGCAGTGGATCCAGGAGGACCAGGCCTCGTACATCTCCTTCA
ATGCGGCCTCCAACTCGCGGTCGCAGATCAAGGCTGCTCTGGACAATGCGGGAAAGATCA
TGAGCCTGACTAAAACCGCCCCCGACTACCTGGTGGGCCAGCAGCCCGTGGAGGACATTT
CCAGCAATCGGATTTATAAAATCTTGGAACTGAACGGGTACGATCCCCAATATGCGGCTT
CCGTTTTTCTGGGATGGGCCACGAAAAAGTTCGGCAAGAGGAACACCATCTGGCTGTTTG
GGCCTGCAACTACCGGGAAGACCAACATCGCGGAGGCCATAGCCCACACTGTGCCCTTCT
ACGGGTGCGTAAACTGGACCAATGAAAACTTTCCATTCAATGACTGTGTTGACAAGATGG
TGATCTGGTGGGAGGAGGGAAAGATGACCGCCAAGGTCGTGGAGTCGGCCAAAGCCATTC
TCGGCGGAAGCAAGGTGCGCGTGGACCAGAAATGCAAGTCCTCGGCCCAGATAGACCCGA
CTCCCGTGATCGTCACTTCCAACACCAACATGTGCGCCGTGATTGACGGGAACTCAACGA
CCTTCGAACACCAGCAGCCGTTGCAAGACCGGATGTTCAAATTTGAACTCACCCGCCGTC
TGGATCATGACTTTGGGAAGGTCACCAAGCAGGAAGTCAAAGACTTTTTCCGGTGGGCAA
AGGATCACGTGGTTGAGGTGGAGCATGAATTCTACGTCAAAAAGGGTGGAGCCAAGAAAA
GACCCGCCCCCAGTGACGCATATATAAGTGAGCCCAAACGGGCGCGCGAGTCAGTTGCGC
AGCCATCGACGTCAGACGCGGAAGCTTCGATCAACTACGCGGACAGGTACCAAAACAAAT
GTTCTCGTCACGTGGGCATGAATCTGATGCTGTTTCCCTGCAGACAATGCGAGAGAATGA
ATCAGAATTCAAATATCTGCTTCACTCACGGACAGAAAGACTGTTTAGAGTGCTTTCCCG
TGTCAGAATCTCAACCCGTTTCTGTCGTCAAAAAGGCGTATCAGAAACTGTGCTACATTC
ATCATATCATGGGAAAGGTGCCAGATGCTTGCACTGCCTGCGATCTGGTCAATGTGGATT
TGGATGACTGCATCTCTGAACAATAAATGATTTAAATCAGGTATGGCTGCCGATGGTTAT
CTTCCAGATTGGCTCGAGGACACTCTCTCTGAAGGAATAAGACAGTGGTGGAAGCTCAAA
CCTGGCCCACCACCACCAAAGCCCGCAGAGCGGCATAAGGACGACAGCAGGGGTCTTGTG
CTTCCTGGGTACAAGTACCTCGGACCCTTCAACGGACTCGACAAGGGAGAGCCGGTCAAC
GAGGCAGACGCCGCGGCCCTCGAGCACGACAAGGCCTACGACCGGCAGCTCGACAGCGGA
GACAACCCGTACCTCAAGTACAACCACGCCGACGCGGAGTTTCAGGAGCGCCTTAAAGAA
GATACGTCTTTTGGGGGCAACCTCGGACGAGCAGTCTTCCAGGCGAAAAAGAGGGTTCTT
GAACCTCTGGGCCTGGTTGAGGAACCTGTTAAGACGGCTCCGGGAAAAAAGAGGCCGGTA
GAGCACTCTCCTGTGGAGCCAGACTCCTCCTCGGGAACCGGAAAGGCGGGCAACCAGCCT
GCAAGAAAGAGATTGAATTTCGGTCAGACTGGAGACGCAGACTCCGTACCTGACCCCCAG
CCTCTCGGACAGCCACCAGCAGCCCCCTCTGGTCTGGGAACTAATACGATGGCTACAGGC
AGTGGCGCACCAATGGCAGACAATAACGAGGGCGCCGACGGAGTGGGTAATTCCTCGGGA
AATTGGCATTGCGATTCCACATGGATGGGCGACAGAGTCATCACCACCAGCACCCGCACC
TGGGCTCTGCCCACCTACAACAACCATCTGTACAAGCAGATTTCCAGCCAGTCTGGAGCC
AGCAACGACAACCACTACTTTGGCTACAGCACCCCCTGGGGGTATTTTGACTTCAACAGA
TTCCACTGCCACTTTTCACCACGTGACTGGCAAAGACTCATCAACAACAACTGGGGATTC
CGACCCAAGAGACTCAACTTCAAGCTCTTTAACATTCAAGTCAAAGAGGTCACGCAGAAT
GACGGTACGACGACGATTGCCAATAACCTTACCAGCACGGTTCAGGTGTTTACTGACTCG
GAGTACCAGCTCCCGTACGTCCTCGGCTCGGCGCATCAAGGATGCCTCCCGCCGTTTCCA
GCGGACGTCTTCATGGTGCCACAGTATGGATACCTCACCCTGAACAACGGGAGTCAGGCG
GTAGGACGCTCTTCCTTTTACTGCCTGGAGTACTTTCCTTCTCAGATGCTTCGTACCGGA
AACAACTTTACCTTCAGCTACACCTTTGAAGACGTTCCTTTCCACAGCAGCTACGCTCAC
AGTCAAAGTTTGGACCGTCTCATGAATCCTCTCATCGACCAGTACCTGTATTACTTGAGC
AGAACAAACACTCCAAGCGGAACCACTACGCAGTCCAGGCTTCAGTTTTCTCAGGCCGGA
GCAAGTGACATTCGGGACCAGTCTAGGAACTGGCTTCCTGGACCCTGTTACCGCCAGCAG
CGAGTATCAAAGACAGCTGCGGATAACAACAACAGTGAATACTCGTGGACTGGAGCTACC
AAGTACCACCTCAATGGCAGAGACTCTCTGGTGAATCCAGGCCCGGCCATGGCCAGCCAC
AAGGACGATGAAGAAAAGTTTTTTCCTCAGAGCGGGGTTCTCATCTTTGGGAAGCAAGGC
TCAGAGAAAACAAATGTGGACATTGAAAAGGTCATGATTACAGACGAAGAGGAAATCAGG
ACCACCAATCCCGTGGCTACGGAGCAGTATGGTGCTGTATCTACCAACCTCCAGAGCGGC
AACACACAAGCAGCTACCTCAGATGTCAACACACAAGGCGTTCTTCCAGGCATGGTCTGG
CAGGACAGAGACGTGTACCTGCAGGGGCCCATCTGGGCAAAGATTCCACACACGGACGGA
CATTTTCACCCCTCTCCCCTCATGGGCGGATTCGGACTGAAGCACCCTCCTCCACAGATT
CTCATCAAGAACACCCCGGTACCTGCGAATCCTTCGACCACCTTCAGTGCGGCAAAGTTT
GCTTCCTTCATCACACAGTATTCCACGGGGCAGGTCAGCGTGGAGATCGAGTGGGAGCTG
CAGAAGGAGAACAGCAAACGCTGGAATCCCGAGATCCAGTACACTTCCAACTATAACAAG
TCTGTTAATGTGGACTTTACTGTGGACACTAATGGTGTGTATTCAGAGCCTCGCCCCATT
GGCACCAGATACCTGACTCGTAATCTGTAATTGCTTGTTAATCAATAAACCGTGTAATTC
GTTTCAGTTGAACTTTGGTCTCTGCGTACTTCTTTTCTTATCTAGTTTCCATGGCTACGT
AGATAAGTAGCATGGCGAGTTAATCATTAACTCTAAGGAACCCCTAGTGATGGAGTTGGC
CACTCCCTCTCTGCGCGCTCGCTCGCTCACTGAGGCCGCCCGGGCAAAGCCCGGGCGTCG
GGCGAGCTTTGCCCGGGCGGCCTCAGTGAGCGAGCGAGCGCGCAGAGAGGGAGTGGCCAA
SEQ ID NO: 74
>#1260_AAV.FL.linear [organism = Adeno-associated virus][mol_type = genomic
DNA][isolation_source = liver tissue][topology = linear]
TTGGCCACTCCCTCTCTGCGCGCTCGCTCGCTCACTGAGGCCGGGCGACCAAAGGTCGCC
CGACGCCCGGGCTTTGCCCGGGCGGCCTCAGTGAGCGAGCGAGCGCGCAGAGAGGGAGTG
GCCAACTCCATCACTAGGGGTTCCTGGAGGGGTGGAGTCGTGACGTGAAGTACGTCATAG
GGTTAGGGAGGTCCTGTATTAGAGGTCACGTGAGTGTTTTGCGACATTTTGCGACACCAT
GTGGTCACGCTGGGTATTTAAGCCCGAGTGAGCACGCAGGGTCTCCATTTTGAAGCGGGA
GGTTTGAACGCGCAGCCGCCATGCCGGGATTTTACGAGATTGTGATTAAGGTCCCCAGCG
ACCTTGACGAGCATTTGCCCGGCATTTCTGACAGCTTTGTGAACTGGGTGGCCGAGAAGG
AATGGGAGTTGCCGCCAGATTCTGACATGGATCTGAATCTGATTGAGCAGGCACCCCTGA
CCGTGGCCGAGAAGCTGCAGCGCGACTTTCTGACGGAGTGGCGCCGCGTGAGTAAGGCCC
CGGAGGCCCTCTTCTTTGTGCAATTTGAAAAGGGAGAGAGCTACTTCCACATGCACGTGC
TTGTGGAGACCACCGGGGTGAAATCCATGGTTTTGGGACGTTTCCTGAGTCAGATTCGCG
AAAAACTGATTCAGAGAATTTACCGCGGGATCGAGCCGACTTTGCCAAACTGGTTCGCGG
TCACAAAGACCCGAAATGGCGCCGGAGGCGGGAACAAGGTGGTGGATGAGTGCTACATCC
CCAATTACCTGCTCCCCAAAACCCAACCTGAACTCCAGTGGGCGTGGACTAATATGGAAC
AGTATTTAAGCGCCTGTTTGAATCTCGCGGAGCGTAAACGGTTGGTGGCGCAGCATCTGA
CGCACGTGTCGCAGACGCAGGAGCAGAACAAAGAAAATCAGAATCCCAATTCTGACGCGC
CGGTGATTAGATCAAAAACCTCAGCCAGGTACATGGAGCTGGTCGGGTGGCTCGTGGATA
AGGGGATTACGTCGGAGAAGCAGTGGATCCAGGAGGACCAGGCTTCATACATCTCCTTCA
ATGCGGCCTCCAACTCGCGGTCCCAGATCAAAGCTGCTCTGGACAATGCGGGAAAGATCA
TGAGCCTCACTAAAACTGCCCCCGACTACCTGGTGGGCCAGCAGCCCGTGGAGGACATTT
CCAGCAATCGGATTTATAAAATCTTGGAACTGAACGGGTACGATCCCCAATACGCTGCTT
CCGTCTTTCTGGGATGGGCCACGAAAAAGTTCGGCAAGAGGAACACCATCTGGCTGTTTG
GGCCTGCAACTACCGGGAAGACCAACATCGCGGAGGCCATAGCCCACACTGTGCCCTTCT
ACGGGTGCGTAAACTGGACCAATGAGAACTTTCCTTTCAATGATTGCGTCGACAAGATGG
TGATCTGGTGGGAGGAGGGAAAGATGACCGCCAAGGTTGTGGAGTCGGCCAAAGCCATTC
TCGGAGGAAGCAAGGTGCGCGTGGACCAAAAGTGCAAGTCCTCGGCCCAGATAGACCCGA
CTCCCGTGATCGTCACCTCCAACACCAACATGTGCGCCGTGATTGACGGGAACTCAACGA
CCTTCGAGCACCAGCAGCCGTTGCAAGACCGGATGTTCAAATTTGAACTCGCCCGCCGTC
TGGATCATGACTTTGGGAAGGTCACCAAGCAGGAAGTCAAAGACTTTTTCCGGTGGGCAA
AGGATCACGTGGTTGAGGTGGAGCATGAATTCTACGTCAAAAAGGGTGGAGCCAAGAAAA
GACCCGCCCCCAGTGACGCAGATATAAGTGAGCCCAAACGGGTGCGCGAGTCAGTTGCGC
AGCCATCGACGTCAGACGCGGAAGCTTCGATCAACTACGCGGACAGGTACCAAAACAAAT
GTTCTCGTCACGTGGGCATGAATCTGATGCTGTTTCCCTGCAGACAATGCGAAAGAATGA
ATCAGAATTCAAATATCTGCTTCACTCACGGACAGAAAGACTGTTTAGAGTGCTTTCCCG
TGTCAGAATCTCAACCCGTTTCTGTCGTCAAAAAGGCGTATCAGAAACTTTGCTACATTC
ATCATATCATGGGAAAGGTGCCAGACGCTTGCACTGCCTGCGATCTGGTCAATGTGGATT
TGGATGACTGCATCTCTGAACAATAAATGATTCAAATCAGGTATGGCTGCCGATGGTTAT
CTTCCAGATTGGCTCGAGGACACTCTCTCTGAAGGAATAAGACAGTGGTGGAAGCTCAAA
CCTGGCCCACCACCACCAAAGCCCGCAGAGCGGCATAAGGACGACGGCAGGGGTCTTGTG
CTTCCTGGGTACAAGTACCTCGGACCCTTCAACGGACTCGACAAGGGAGAGCCGGTCAAC
GAGGCAGACGCCGCGGCCCTCGAGCACGACAAGGCCTACGACCGGCAGCTCGACAGCGGA
GACAACCCGTACCTCAAGTACAACCACGCCGACGCGGAGTTTCAGGAGCGCCTTAAAGAA
GATACGTCTTTTGGGGGCAACCTCGGACGAGCAGTCTTCCAGGCGAAAAAGAGGGTTCTT
GAACCTCTGGGCCTGGTTGAGGAACCTGTTAAGACGGCTCCGGGAAAAAAGAGGCCGGTA
GAGCACTCTCCTGCGGAGCCAGACTCCTCCTCGGGAACCGGAAAAGCGGGCCAGCAGCCT
GCAAGAAAAAGACTGAATTTCGGTCAGACTGGAGACGCAGACTCCGTACCTGACCCCCAG
CCTCTCGGACAGCCACCAGCAGCCCCCTCTGGTCTGGGAACTAATACGATGGCTACAGGC
AGTGGCGCACCAATGGCAGACAATAACGAGGGCGCCGACGGAGTGGGTAATTCCTCGGGA
AATTGGCATTGCGATTCCACATGGATGGGCGACAGAGTCATCACCACCAGCACCCGCACC
TGGGCTCTGCCCACCTACAACAACCATCTGTACAAGCAGATTTCCAGCCAGTCTGGAGCC
AGCAACGACAACCACTACTTTGGCTACAGCACCCCCTGGGGGTATTTTGACTTCAACAGA
TTCCACTGCCACTTTTCACCACGTGACTGGCAAAGACTCATCAACAACAACTGGGGATTC
CGACCCAAGAGACTCAACTTCAAGCTCTTTAACATTCAAGTCAAAGAGGTCACGCAGAAT
GACGGTACGACGACGATTGCCAATAACCTTACCAGCACGGTTCAGGTGTTTACTGACTCG
GAGTACCAGCTCCCGTACGTCCTCGGCTCGGCGCATCAAGGATGCCTCCCGCCGTTCCCA
GCGGACGTCTTCATGGTCCCACAGTATGGATACCTCACCCTGAACAACGGGAGTCAGGCG
GTAGGACGCTCTTCATTTTACTGCCTGGAGTACTTTCCTTCTCAGATGCTTCGTACCGGA
AACAACTTTACCTTCAGCTACACCTTTGAAGACGTTCCTTTCCACAGCAGCTACGCTCAC
AGTCAAAGTCTGGACCGTCTCATGAATCCTCTCATCGACCAGTACCTATATTACTTAAGC
AGAACAAACACGCCGAGCGGAACCACTACGCAGTCCAGGCTTCAGTTTTCTCAGGCCGGA
GCAAGTGACATTCGGGACCAGTCTAGGAACTGGCTTCCTGGACCCTGTTACCGCCAGCAG
CGAGTATCAAAGACATCTGCGGATAACAACAACAGTGAATACTCGTGGACTGGAGCTACC
AAGTACCACCTCAATGGCAGAGACTCTCTGGTGAATCCGGGCCCGGCCATGGCCAGCCAC
AAGGACGATGAAGAAAAGTTTTTTCCTCAGAGCGGGGTTCTCATATTTGGGAAGCAAGGC
TCAGAGAAAACAAATGTGGACATTGAAAAGGTCATGATTACAGACGAAGAGGAAATCAGG
ACCACCAATCCCGTGGCTACGGAGCAGTATGGTGCTGTATCTACCAACCTCCAGAGCGGC
AACACACAAGCAGCTACCTCAGATGTCAACGCACAAGGTGTTCTTCCAGGCATGGTCTGG
CAGGACAGAGACGTGTACCTGCAGGGGCCCATCTGGGCAAAGATTCCCCACACGGACGGA
CACTTTCACCCTTCTCCTCTTATGGGCGGATTCGGACTTAAACACCCTCCCCCGCAGATT
CTCATCAAGAACACCCCGGTACCTGCGAATCCTTCGACCACCTTCAGCGCGGCAAAGTTT
GCTTCCTTCATCACACAGTATTCCACGGGGCAGGTCAGCGTAGAAATCGAGTGGGAGCTG
CAGAAGGAGAACAGCAAACGCTGGAATCCCGAGATCCAGTACACTTCCAACTATAACAAA
TCTGTTAATGTGGACTTTACTGTGGACACTAATGGTGTGTATTCAGAGCCTCGCCCCATT
GGCACCAGATACCTGACTCGTAATCTGTAATTGCTTGTTAATCAATAAACCGTTTAATTC
GTTTCAGTTGAACTTTGGTCTCTGCGTACTTCTTTCTTATCTAGTTTCCATGGCTACGTA
GATAAGTAGCATGGCGGGTTAATCATTAACACAAGGAACCCCTAGTGATGGAGTTGGCCA
CTCCCTCTCTGCGCGCTCGCTCGCTCACTGAGGCCGCCCGGGCAAAGCCCGGGCGTCGGG
CGACCTTTGGTCGGGCGGCCTCAGTGAGCGAGCGAGCGCGCAGAGAGGGAGTGGCCAA
SEQ ID NO: 75
>#3765_AAV.FL.linear [organism = Adeno-associated virus][mol_type = genomic
DNA][isolation_source = liver tissue][topology = linear]
TTGGCCACTCCCTCTCTGCGCGCTCGCTCGCTCACTGAGGCCGGGCGACCAAAGGTCGCC
CGACGCCCGGGCTTTGCCCGGGCGGCCTCAGTGAGCGAGCGAGCGCGCAGAGAGGGAGTG
GCCAACTCCATCACTAGGGGTTCCTGGAGGGGTGGAGTCGTGACGTAAATTACGTCATAG
GGTTAGGGAGGTCCTGTATTAGAGGTCACGTGAGTGTTTTGCGACATTTTGCGACACCAT
GTGGTCACGCTGGGTATTTAAGCCCGAGTGAGCACGCAGGGTCTCCATTTTGAAGCGGGA
GGTTTGAACGCGCAGCCGCCATGCCAGGATTTTACGAGATTGTGATTAAGGTCCCCAGCG
ACCTTGACGAGCATTTGCCCGGCATTTCTGACAGCTTTGTGAACTGGGTGGCCGAGAAGG
AATGGGAGTTGCCGCCAGATTCTGACATGGATCTGAATCTGATTGAGCAGGCACCCCTGA
CCGTGGCCGAGAAGCTGCAGCGCGACTTTCTGACGGAGTGGCGCCGTGTGAGTAAGGCCC
CGGAGGCCCTCTTCTTTGTGCAATTTGAGAAGGGAGAGAGCTACTTCCACATGCACGTGC
TCGTGGAGACCACCGGGGTGAAATCCATGGTTTTGGGACGTTTCCTGAGTCAGATTCGCG
AAAAACTGATTCAGAGAATTTACCGCGGGATCGAGCCGACTTTGCCAAACTGGTTCGCGG
TCACAAAGACCCGAAATGGCGCCGGAGGCGGGAACAAGGTGGTGGATGAGTGCTACATCC
CCAATTACCTGCTCCCCAAAACCCAGCCTGAGCTCCAGTGGGCGTGGACTAATATGGAAC
AGTATTTAAGCGCCTGTTTGAATCTCGCGGAGCGTAAACGGTTGGTGGCGCAGCATCTGA
CGCACGTGTCGCAGACGCAGGAGCAGAACAAAGAGAATCAGAATCCCAATTCTGACGCGC
CGGTGATCAGATCAAAAACCTCAGCCAGGTACATGGAGCTGGTCGGGTGGCTCGTGGATA
AGGGGATTACCTCGGAGAAGCAGTGGATCCAGGAGGATCAGGCTTCATACATCTCCTTCA
ATGCGGCCTCCAACTCGCGGTCCCAAATCAAGGCTGCTCTGGACAATGCGGGAAAGATTA
TGAGCCTGACTAAAACTGCCCCCGACTACCTGGTGGGCCAGCAGCCCGTGGAGGACATTT
CCAGCAATCGGATTTATAAAATCTTGGAACTGAACGGGTACGATCCCCAATACGCTGCTT
CCGTCTTTCTGGGATGGGCCACGAAAAAGTTCGGCAAGAGGAACACCATCTGGCTGTTTG
GGCCTGCAACTACCGGGAAGACCAACATCGCGGAAGCCATAGCCCACACTGTGCCCTTCT
ACGGGTGCGTAAACTGGACCAATGAGAACTTTCCATTCAACGACTGTGTCGACAAGATGG
TGATCTGGTGGGAGGAGGGGAAGATGACCGCCAAGGTTGTGGAGTCGGCCAAAGCCATTC
TCGGAGGAAGCAAGGTGCGCGTGGACCAGAAATGCAAGTCCTCGGCCCAGATAGACCCGA
CTCCCGTGATCGTCACCTCCAACACCAACATGTGCGCCGTGATTGACGGGAACTCAACGA
CCTTCGAGCACCAGCAGCCGTTGCAAGACCGGATGTTCAAATTTGAACTCACCCGCCGTC
TGGATCATGACTTTGGGAAGGTCACCAAGCAGGAAGTGAAAGACTTTTTCCGGTGGGCAA
ATGATCACGTGGTCGAGGTGGAGCATGAATTCTACGTCAAAAAGGGTGGAGCCAAGAAAA
GACCCGCCCCCAGTGACGCAGATATAAGTGAGCCCAAACGGGCGCGCGAGTCAGTTGCGC
AGCCATCGACGTCAGACGCGGAAGCTTCAATCAACTACGCGGACAGGTACCAAAACAAAT
GTTCTCGTCACGTGGGCATGAATCTGATGCTGTTTCCCTGCAGACAATGCGAGAGAATGA
ATCAGAATTCAAATATCTGCTTCACTCACGGACAGAAAGACTGTTTAGAGTGCTTTCCCG
TGTCAGAATCTCAACCCGTTTCTGTCGTCAAAAAGGCGTATCAGAAACTTTGCTACATTC
ATCATATTATGGGAAAGGTGCCAGACGCTTGCACTGCCTGCGATCTGGTCAATGTGGATT
TGGATGACTGCATCTCTGAACAATAAATGATTTAAATCAGGTATGGCTGCCGATGGTTAT
CTTCCAGATTGGCTCGAGGACACTCTCTCTGAAGGAATAAGACAGTGGTGGAAGCTCAAA
CCTGGCCCACCACCACCAAAGCCCGCAGAGCGGCATAAGGACGACAGCAGGGGTCTTGTG
CTTCCTGGGTACAAGTACCTCGGACCCTTCAACGGACTCGACAAGGGGGAGCCGGTCAAC
GAGGCAGACGCCGCGGCCCTCGAGCACGACAAGGCCTACGACCGGCAGCTCGACAGCGGA
GACAACCCGTACCTCAAGTACAACCACGCCGACGCGGAGTTTCAGGAGCGTCTTAAAGAA
GATACGTCTTTTGGGGGCAACCTCGGACGAGCAGTCTTCCAGGCGAAAAAGAGGGTTCTT
GAACCTCTGGGCCTGGTTGAGGAGCCTGTTAAGACGGCTCCGGGAAAAAAGAGGCCGGTA
GAGCACTCTCCTGCGGAGCCAGACTCCTCCTCGGGAACCGGAAAAGCGGGCAACCAGCCT
GCAAGAAAAAGACTGAATTTTGGTCAGACTGGAGACGCAGACTCCGTACCTGACCCCCAG
CCTCTCGGACAGCCACCAGCAGCCCCCTCTGGTCTGGGAACTAATACGATGGCTACAGGC
AGTGGCGCACCAATGGCAGACAATAACGAGGGCGCCGACGGAGTGGGTAATTCCTCGGGA
AATTGGCATTGCGATTCCACATGGATGGGCGACAGAGTCATCACCACCAGCACCCGAACC
TGGGCTCTGCCCACCTACAACAACCATCTGTACAAGCAGATTTCCAGCCAATCAGGAGCC
TCAAACGACAACCACTACTTTGGCTACAGCACCCCTTGGGGGTATTTTGACTTCAACAGA
TTCCACTGCCACTTTTCACCACGTGACTGGCAAAGACTCATCAACAACAATTGGGGATTC
CGACCCAAGAGACTCAACTTCAAGCTCTTTAACATTCAAGTCAAAGAGGTCACGCAGAAT
GACGGTACGACGACGATCGCCAATAACCTTACCAGCACGGTTCAGGTGTTTACTGACTCG
GAGTACCAGCTCCCGTACGTTCTCGGCTCGGCGCATCAAGGATGCCTCCCGCCGTTCCCA
GCAGACGTCTTCATGGTGCCACAGTATGGATACCTCACCCTGAACAACGGGAGTCAAGCA
GTAGGACGCTCTTCATTTTACTGCCTGGAATACTTTCCTTCTCAGATGCTTCGTACCGGA
AACAACTTTACCTTCAGCTATACCTTTGAGGACGTTCCTTTCCACAGCAGCTACGCTCAC
AGCCAGAGTTTGGACCGCCTCATGAATCCTCTCATCGACCAGTACCTGTATTACTTGAGC
AGAACAAACACTCCAAGCGGAACCACCACGCAGTCCAGGCTTCAGTTTTCTCAGGCCGGA
GCAAGTGACATTCGGGACCAGTCTAGGAACTGGCTTCCTGGACCCTGTTACCGCCAGCAG
CGAGTATCAAAGACACCTGCGGATAACAACAACAGTGAATACTCGTGGACTGGAGCTACC
AAGTACCACCTCAATGGCAGAGACTCTCTGGTGAATCCGGGCCCGGCCATGGCCAGCCAC
AAGGACGATGAAGAAAAGTTTTTTCCTCAAAGCGGGGTTCTCATCTTTGGGAAGCAAGGC
TCAGAGAAAACAAATGTGGACATTGAAAAGGTCATGATTACAGACGAAGAGGAAATCAGG
ACCACCAATCCCGTGGCTACGGAGCAGTATGGTTCTGTATCTACCAACCTCCAGAGCGGC
AACACACAAGCAGCTACCGCAGATGTCAACACACAAGGCGTTCTTCCAGGCATGGTCTGG
CAGGACAGAGACGTGTACCTGCAGGGGCCCATCTGGGCAAAGATTCCACACACGGATGGA
CACTTTCACCCTTCTCCTCTTATGGGAGGATTTGGACTTAAACACCCTCCCCCGCAGATT
CTCATCAAAAACACCCCGGTACCTGCGAATCCTTCGACCACTTTCAGTGCAGCAAAGTTT
GCTTCCTTCATTACACAGTATTCCACGGGGCAGGTCAGCGTGGAGATCGAGTGGGAGCTG
CAGAAGGAGAACAGCAAACGCTGGAACCCCGAGATCCAGTACACTTCCAACTACAACAAA
TCTGTTAATGTGGACTTTACTGTGGACACTAATGGTGTGTATTCAGAGCCTCGCCCCATT
GGCACCAGATACCTGACTCGTAATCTGTAATTGCTTGTTAATCAATAAACCGTTTAATTC
GTTTCAGTTGAACTTTGGTCTCCGCGTACTTCTTTCTTATCTAGTTTCCATGGCTACGTA
GATAAGTAGCATGGCGGGTTAATCATTAACTTTAAGGAACCCCTAGTGATGGAGTTGGCC
ACTCCCTCTCTGCGCGCTCGCTCGCTCACTGAGGCCGGGCGACCAAAGGTCGCCCGACGC
CCGGGCTTTGCCCGGGCGGCCTCAGTGAGCGAGCGAGCGCGCAGAGAGGGAGTGGCCAA
SEQ ID NO: 76
>#471_AAV.FL.linear [organism = Adeno-associated virus][mol_type = genomic DNA]
[isolation_source = liver tissue][topology = linear]
TTGGCCACTCCCTCTCTGCGCGCTCGCTCGCTCACTGAGGCCGGGCGACCAAAGGTCGCC
CGACGCCCGGGCTTTGCCCGGGCGGCCTCAGTGAGCGAGCGAGCGCGCAGAGAGGGAGTG
GCCAACTCCATCACTAGGGGTTCCTGGAGGGGTGGAGTCGTGACGTGAAGTACGTCATAG
GGTTAGGGAGGTCCTATATTAGAGGTCACGTGAGTGTTTTGCGACATTTTGCGACATCAT
GTGGTCACGCTAGGTATTTAAGCCCGAGTGAGCACGCAGGGTCTCCATTTTGAAGCGGGA
GGTTTGAACGCGCAGCCGCCATGCCGGGGTTTTACGAGATTGTGATTAAGGTCCCCAGCG
ACCTTGACGAGCATCTTCCCGGCATTTCTGACAGCTTTGTGAACTGGGTGGCCGAGAAGG
AATGGGAGTTGCCGCCAGATTCTGACATGGATCTGAATCTGATTGAGCAGGCACCCCTGA
CCGTGGCCGAGAAGCTGCAGCGCGACTTTCTGACAGAATGGCGCCGTGTGAGTAAGGCCC
CGGAGGCCCTTTTCTTTGTGCAATTTGAGAAGGGAGAGAGCTACTTCCACATGCACGTGC
TGGTGGAAACCACCGGGGTGAAATCCATGGTTTTGGGACGTTTCCTGAGTCAGATTCGCG
AAAAACTGATTCAGAGAATTTACCGCGGGATCGAGCCGACTTTGCCAAACTGGTTCGCGG
TCACAAAGACCCGAAATGGCGCCGGAGGCGGGAACAAGGTGGTGGATGAGTGCTACATCC
CCAATTACCTGCTCCCCAAAACCCAGCCTGAGCTCCAGTGGGCGTGGACTAATATGGAAC
AGTATTTAAGCGCCTGTTTGAATCTCGCGGAGCGTAAACGGTTGGTGGCGCAGCATCTGA
CGCACGTGTCGCAGACGCAGGAGCAGAACAAAGAGAATCAGAATCCAAATTCTGACGCGC
CGGTGATCAGATCAAAAACCTCAGCCAGGTACATGGAGCTGGTCGGGTGGCTCGTGGATA
AGGGGATTACCTCTGAGAAGCAGTGGATCCAGGAGGACCAGGCCTCCTACATCTCCTTCA
ATGCGGCCTCCAACTCGCGGTCACAGATCAAGGCTGCTCTGGACAATGCGGGAAAGATTA
TGAGCCTGACTAAAACGGCCCCCGACTACCTGGTGGGCCAGCAGCCCGTGGAGGACATTT
CCGGCAATCGGATTTATAAAATCTTGGAACTGAACGGGTACGATCCCCAATACGCGGCTT
CCGTCTTTCTGGGATGGGCCACGAAAAAGTTCGGCAAGAGGAACACCATCTGGCTGTTTG
GGCCTGCAACTACCGGGAAGACAAACATCGCGGAGGCCATAGCCCACACGGTGCCCTTCT
ACGGGTGCGTAAACTGGACCAATGAGAACTTTCCTTTCAACGACTGTGTCGACAAGATGG
TGATCTGGTGGGAGGAGGGGAAGATGACCGCCAAGGTCGTGGAGTCGGCCAAAGCCATTC
TTGGCGGAAGCAAGGTGCGCGTGGACCAGAAATGCAAGTCCTCGGCCCAGATAGACCCGA
CTCCTGTGATTGTCACCTCCAACACCAACATGTGCGCCGTGATTGACGGGAACTCAACGA
CCTTCGAACACCAGCAGCCGTTGCAAGACCGGATGTTCAAATTTGAACTCACCCGCCGTC
TGGATCATGACTTTGGGAAGGTCACCAAACAGGAAGTCAAAGACTTTTTCCGGTGGGCAA
AGGATCACGTGGTTGAGGTGGAGCATGAATTCTACGTCAAAAAGGGTGGAGCTAAGAAAA
GGCCCGCCCCCAGTGACGCAGATATAAGTGAGCCCAAACGGGCGCGCGAGTCAGTTGCGC
AGCCATCTACGTCAGACGCGGAAGCTTCGATCAACTACGCGGACAGGTACCAAAACAAAT
GTTCTCGTCACGTGGGCATGAATCTGATGCTGTTTCCCTGCAGACAATGCGAGAGAATGA
ATCAGAATTCAAATATCTGCTTCACTCACGGACAGAAAGACTGTTTAGAGTGCTTTCCCG
TGTCAGAATCTCAACCCGTTTCTGTCGTCAAAAAGGCGTATCAGAAACTTTGCTACATTC
ATCATATCATGGGAAAGGTGCCAGACGCTTGCACTGCCTGCGATCTGGTCAATGTGGATT
TGGATGACTGCATCTCTGAACAATAAATGATTTAAATCAGGTATGGCTGCCGATGGTTAT
CTTCCAGATTGGCTCGAGGACACTCTCTCTGAAGGAATAAGACAGTGGTGGAAGCTCAAA
CCTGGCCCACCACCACCAAAGCCCGCAGAGCGGCATAAGGACGACAGCAGGGGTCTTGTG
CTTCCTGGGTACAAGTACCTCGGACCCTTCAACGGACTCGACAAGGGGGAGCCGGTCAAC
GAGGCAGACGCCGCGGCCCTCGAGCACGACAAGGCCTACGACCGGCAGCTCGACAGCGGA
GACAACCCGTACCTCAAATACAACCACGCCGACGCGGAGTTTCAGGAGCGTCTTAAAGAA
GATACGTCTTTTGGGGGCAACCTCGGACGAGCAGTCTTCCAGGCGAAAAAGAGGGTTCTT
GAACCTCTGGGCCTGGTTGAGGAGCCTGTTAAGACGGCTCCGGGAAAAAAGAGGCCGGTA
GAACACTCTCCTGCGGAGCCAGACTCCTCCTCGGGAACCGGAAAAGCGGGCAACCAGCCT
GCAAGAAAAAGATTGAATTTCGGTCAGACTGGAGACGCAGACTCCGTACCTGACCCCCAG
CCTCTCGGACAGCCACCAGCAGCCCCCTCTGGTCTGGGAACTAATACGATGGCTACAGGC
AGTGGCGCACCAATGGCAGACAATAACGAGGGCGCCGACGGAGTGGGTAATTCCTCGGGA
AATTGGCATTGCGATTCCACATGGATGGGCGACAGAGTCATCACCACCAGCACCCGAACC
TGGGCTCTGCCCACCTACAACAACCATCTGTACAAGCAGATTTCCAGCCAATCAGGAGCC
TCAAACGACAACCACTACTTTGGCTACAGCACCCCTTGGGGGTATTTTGACTTCAACAGA
TTCCACTGCCACTTTTCACCACGTGACTGGCAAAGACTCATCAACAACAACTGGGGATTC
CGACCAAAGAGACTCAACTTCAAGCTCTTTAACATTCAAGTCAAGGAGGTCACGCAGAAT
GACGGTACGACGACGATTGCCAATAACCTTACCAGCACGGTTCAGGTGTTTACTGACTCG
GAGTACCAGCTCCCGTACGTCCTCGGCTCGGCGCATCAAGGATGCCTCCCGCCGTTCCCA
GCAGACGTCTTCATGGTGCCACAGTATGGATACCTCACCCTAAACAACGGGAGTCAAGCA
GTAGGACGCTCTTCATTTTACTGCCTGGAGTACTTTCCTTCTCAGATGCTTCGTACCGGA
AACAACTTTACCTTCAGCTATACCTTTGAGGACGTTCCTTTCCACAGCAGCTACGCTCAC
AGCCAGAGTTTGGACCGCCTCATGAATCCTCTCATCGACCAGTACCTGTATTACTTGAGC
AGAACAAACACTCCAAGCGGAACCACCACGCAGTCCAGGCTTCAGTTTTCTCAGGCCGGA
GCAAGTGACATTCGGGACCAGTCTAGGAACTGGCTTCCTGGACCCTGTTACCGCCAGCAG
CGAGTATCAAAGACACCTGCGGATAACAACAACAGTGAATACTCGTGGACTGGAGCTACC
AAGTACCACCTCAATGGCAGAGACTCTCTGGTGAATCCGGGCCCGGCCATGGCCAGCCAC
AAGGACGATGAAGAAAAGTTTTTTCCTCAAAGCGGGGTTCTCATCTTTGGGAAGCAAGGC
TCAGAGAAAACAAATGTGGACATTGAAAAGGTCATGATTACAGACGAAGAGGAAATCAGG
ACCACCAATCCCGTGGCTACGGAGCAGTATGGTTCTGTATCTACCAACCTCCAGAGCGGC
AACACACAAGCAGCTACCGCAGATGTCAACACACAAGGCGTTCTTCCAGGCATGGTCTGG
CAGGACAGAGACGTGTACCTGCAGGGGCCCATTTGGGCAAAAATTCCACACACGGATGGA
CACTTTCACCCTTCTCCTCTTATGGGAGGATTTGGACTTAAACACCCTCCCCCGCAGATT
CTCATCAAAAACACCCCGGTACCTGCGAATCCTTCAACCACCTTCAGTGCAGCAAAGTTT
GCTTCCTTCATTACACAGTACTCCACGGGGCAGGTCAGCGTGGAGATCGAGTGGGAGCTG
CAGAAGGAGAACAGCAAACGCTGGAATCCCGAGATTCAATACACTTCCAACTACAACAAA
TCTGTTAATGTGGACTTTACTGTGGACACTAATGGTGTGTATTCAGAGCCTCGCCCCATT
GGCACCAGATACCTGACTCGTAATCTGTAATTGCTTGTTAATCAATAAACCGTGTAATTC
GTTTCAGTTGAACTTTGGTCTCTGCGTACTTCTTTCTTATCTAGTTTCCATGTCTACGTA
GATAAGTAGCATGGCGGGTTAATCATTAACACAAGGAACCCCTAGTGATGGAGTTGGCCA
CTCCCTCTCTGCGCGCTCGCTCGCTCACTGAGGCCGCCCGGGCAAAGCCCGGGCGTCGGG
CGACCTTTGGTCGGGCGGCCTCAGTGAGCGAGCGAGCGCGCAGAGAGGGAGTGGCCAA
SEQ ID NO: 77
>#387_AAV.FL.linear [organism = Adeno-associated virus][mol_type = genomic DNA]
[isolation_source = liver tissue][topology = linear]
TTGGCCACTCCCTCTCTGCGCGCTCGCTCGCTCACTGAGGCCGGGCGACCAAAGGTCGCC
CGACGCCCGGGCTTTGCCCGGGCGGCCTCAGTGAGCGAGCGAGCGCGCAGAGAGGGAGTG
GCCAACTCCATCACTAGGGGTTCCTGGAGGGGTGGAGTCGTGACGTGAAGTACGTCATAG
GGTTAGGGAGGTCCTGTATTAGAGGTCACGTGAGTGCTTTGCGACATTTTGCGACACTAT
GTGGTTACGCAGGGTATTTAAGCCCGAGTGAGCACGCAGGGTCTCCATTTTGAAGCGGGA
GGTTTGAACGCGCAGCCGCCATGCCGGGGTTTTACGAGATCGTGATTAAGGTCCCCAGCG
ACCTTGACGAGCATCTGCCCGGCATTTCTGACAGCTTTGTGAACTGGGTGGCCGAGAAGG
AATGGGAGTTGCCGCCAGATTCTGACATGGATCTGAATCTGATTGAGCAGGCACCCCTGA
CCGTGGCCGAGAAATTGCAGCGCGACTTTCTGACGGAATGGCGCCGTGTGAGTAAGGCCC
CCGAGGCCCTTTTCTTTGTGCAATTTGAGAAGGGAGAGAGCTACTTCCACATGCACGTGC
TCGTGGAGACCACGGGGGTCAAATCCATGGTTTTGGGACGTTTCCTGAGTCAAATTCGCG
AAAAACTGATTCAGAGAATTTACCGCGGGATCGAACCGACTTTGCCAAACTGGTTCGCGG
TCACAAAGACCCGAAATGGCGCCGGAGGCGGGAACAAGGTGGTGGATGAGTGCTACATCC
CCAATTACCTGCTCCCCAAAACCCAACCTGAGCTCCAGTGGGCGTGGACTAATATGGAAC
AGTATTTAAGCGCCTGTTTGAATCTCGCGGAGCGTAAACGGTTGGTGGCGCAGCATCTGA
CGCACGTGTCGCAGACCCAGGAGCAGAACAAAGAGAATCAGAATCCCAATTCTGACGCGC
CGGTGATCAGATCAAAAACATCAGCCAGGTACATGGAGCTGGTCGGGTGGCTCGTGGATA
AGGGGATTACCTCGGAGAAGCAGTGGATTCAGGAGGACCAGGCCTCATACATCTCCTTCA
ATGCGGCCTCCAACTCGCGGTCCCAGATCAAGGCTGCTCTGGACAATGCGGGAAAGATCA
TGAGCCTGACTAAAACGGCCCCCGACTACCTGGTGGGCCAGCAGCCCGTGGAGGACATTT
CCAGCAATCGGATTTATAAAATCTTGGAACTGAACGGGTACGATCCCCAATATGCGGCTT
CCGTCTTTCTGGGATGGGCCACGAAAAAGTTCGGCAAGAGGAACACCATCTGGCTGTTTG
GACCTGCAACTACCGGGAAGACCAACATCGCAGAGGCCATAGCCCACACGGTTCCCTTCT
ACGGGTGCGTAAACTGGACCAATGAGAACTTTCCTTTCAACGATTGCGTCGACAAGATGG
TGATCTGGTGGGAGGAGGGGAAGATGACCGCCAAGGTCGTGGAGTCGGCCAAAGCCATTC
TCGGCGGAAGCAAGGTGCGCGTGGACCAGAAATGCAAGTCCTCGGCCCAGATAGACCCGA
CTCCCGTGATAGTCACCTCCAACACCAACATGTGCGCCGTGATTGACGGGAACTCCACGA
CCTTCGAACACCAGCAGCCGTTGCAAGACCGGATGTTCAAATTTGAACTTACCCGCCGTC
TGGATCATGACTTTGGAAAGGTCACCAAGCAGGAAGTGAAAGACTTTTTCCGGTGGGCAC
AGGATAACGTGGTTGAGGTGGAGCATGAATTCTACGTCAAAAAGGGTGGAGCCAAGAAAA
GACCCGCCCCCAGTGACGCAGATATAAGTGAGCCCAAACGGGCGCGCGAGTCAGTTGCGC
AGCCATCGACGTCAGACGCGGAAGCTTCAATCAACTACGCGGACAGGTACCAAAACAAAT
GTTCTCGTCACGTGGGCATGAATCTGATGCTGTTTCCCTGCAGACAATGCGAGAGAATGA
ATCAGAATTCAAATATCTGCTTCACTCACGGACAGAAAGACTGTTTAGAGTGCTTTCCCG
TGTCAGAATCTCAACCCGTTTCTGTCGTCAAAAAGGCGTATCAGAAACTTTGCTACATTC
ATCATATCATGGGAAAGGTGCCAGACGCTTGCACTGCCTGCGATCTGGTCAATGTGGATT
TGGATGACTGCATCTCTGAACAATAAATGATTTAAATCAGGTATGGCTGCCGATGGTTAT
CTTCCAGATTGGCTCGAGGACACTCTCTCTGAAGGAATAAGACAGTGGTGGAAGCTCAAA
CCTGGCCCACCACCACCAAAGCCCGCAGAGCGGCATAAGGACGACAGCAGGGGTCTTGTG
CTTCCTGGGTACAAGTACCTCGGACCCTTCAACGGACTCGACAAGGGGGAGCCGGTCAAC
GAGGCAGACGCCGCGGCCCTCGAGCACGACAAGGCCTACGACCGGCAGCTCGACAGCGGA
GACAACCCGTACCTCAAGTACAACCACGCCGACGCGGAGTTTCAGGAGCGTCTTAAAGAA
GATACGTCTTTTGGGGGCAACCTCGGACGAGCAGTCTTCCAGGCGAAAAAGAGGGTTCTT
GAACCTCTGGGCCTGGTTGAGGAACCTGTTAAAACGGCTCCGGGAAAAAAGAGGCCGGTA
GAGCACTCTCCTGCGGAGCCAGATTCCTCCTCCGGAACTGGAAAGTCGGGCAACCAGCCT
GCAAGAAAGAGATTGAATTTCGGTCAGACTGGAGACGCAGACTCCGTACCTGACCCCCAG
CCTCTCGGACAGCCACCAGCAGCCCCCTCTGGTCTGGGAACTAATACGATGGCTACAGGC
AGTGGCGCACCAATGGCAGACAATAACGAGGGCGCCGACGGAGTGGGTAATTCCTCGGGA
AATTGGCATTGCGATTCCACATGGATGGGCGACAGAGTCATCACCACCAGCACCCGAACC
TGGGCTCTGCCCACCTACAACAACCATCTCTACAAGCAGATTTCCAGCCAGTCTGGAGCC
TCAAACGACAACCACTACTTTGGCTACAGCACCCCCTGGGGGTATTTTGACTTCAACAGA
TTCCACTGCCACTTTTCACCACGTGACTGGCAAAGACTCATCAACAACAATTGGGGATTC
CGGCCCAAAAGACTCAACTTCAAGCTGTTTAACATTCAAGTCAAGGAGGTCACGCAGAAT
GACGGTACGACGACGATTGCCAATAACCTTACCAGCACGGTTCAGGTGTTTACTGACTCG
GAGTACCAGCTCCCGTACGTCCTCGGCTCGGCGCATCAAGGATGCCTCCCGCCGTTCCCA
GCAGACGTCTTCATGGTGCCACAGTATGGATACCTCACCCTGAACAACGGGAGTCAGGCA
GTAGGACGCTCTTCATTTTACTGCCTAGAGTACTTTCCTTCTCAGATGCTGCGTACCGGA
AACAACTTTACCTTCAGCTACACCTTTGAGGACGTTCCTTTCCACAGCAGCTACGCTCAC
AGCCAGAGTTTGGACCGTCTCATGAATCCTCTCATCGACCAGTACCTGTATTACTTGAGC
AGAACAAACACTCCAAGCGGAACCACCACGCAGTCCAGGCTTCAGTTTTCTCAGGCCGGA
GCAAGTGACATTCGGGACCAGTCTAGGAACTGGCTTCCTGGACCCTGTTACCGCCAGCAG
CGAGTATCAAAGACACCTGCGGATAACAACAACAGTGAATACTCGTGGACTGGAGCTACC
AAGTACCACCTCAATGGTAGAGACTCTCTGGTGAATCCGGGCCCGGCCATGGCCAGCCAC
AAGGACGATGAAGAAAAGTTTTTTCCTCAGAGCGGGGTTCTCATCTTTGGGAAGCAAGGC
TCAGAGAAAACAAATGTGGACATTGAAAAGGTCATGATTACAGACGAAGAAGAAATCAGG
ACCACCAATCCCGTGGCTACGGAGCAGTATGGTTCTGTATCTACCAACCTCCAGAGCGGC
AACACACAAGCAGCTACCGCAGATGTCAACACACAAGGCGTTCTTCCAGGCATGGTCTGG
CAGGACAGAGACGTGTACCTGCAGGGGCCTATCTGGGCAAAGATTCCACACACGGACGGA
CATTTTCACCCCTCTCCCCTCATGGGCGGATTCGGACTTAAACACCCTCCTCCGCAAATT
CTCATCAAGAACACCCCGGTACCTGCGAATCCTTCGACCACCTTCAGTGCGGCAAAGTTT
GCTTCCTTCATCACACAGTATTCCACGGGGCAGGTCAGCGTGGAGATCGAGTGGGAGTTG
CAGAAGGAGAACAGCAAACGCTGGAACCCTGAGATCCAGTACACTTCCAACTACAACAAG
TCTGTTAATGTGGACTTTACTGTGGACACTAATGGTGTGTATTCAGAGCCTCGCCCCATT
GGCACCAGATACCTGACTCGTAATCTGTAATTGTTTGTTAATCAATAAACCGTTTAATTC
GTTTCAGTTGAACTTTGGTCTCTGCGTACTTATTTCTTATCTAGTTGCCATGGCTACGTA
AATAAGTAGCATGGCGGGTTAATCATAAACTCTAAGGAACCCCTAGTGATGGAGTTGGCC
ACTCCCTCTCTGCGCGCTCGCTCGCTCACTGAGGCCGCCCGACCAAAGGTCGCCCGACGC
CCGGGCTTTGCCCGGGCGGCCTCAGTGAGCGAGCGAGCGCGCAGAGAGGGAGTGGCCAA
SEQ ID NO: 78
>#2040_AAV.FL.linear [organism = Adeno-associated virus][mol_type = genomic
DNA][isolation_source = liver tissue][topology = linear]
TTGGCCACTCCCTCTCTGCGCGCTCGCTCGCTCACTGAGGCCGGGCGACCAAAGGTCGCC
CGACGCCCGGGCTTTGCCCGGGCGGCCTCAGTGAGCGAGCGAGCGCGCAGAGAGGGAGTG
GCCAACTCCATCACTAGGGGTTCCTGGAGGGGTGGAGTCGTGACGTGAAGTACGTCATAG
GGTTAGGGAGGTCCTGTATTAGAGGTCACGTGAGTGTTTTGCGACATTTTGCGACACCAT
GTGGTTACGCAGGGTATTTAAGCCCGAGTGAGCACGCAGGGTCTCCATTTTGAAGCGGGA
GGTTTGAACGCGCAGTCACCATGCCGGGATTTTACGAGATTGTGATTAAGGTCCCCAGCG
ACCTTGACGAGCATTTGCCCGGCATTTCTGACAGCTTTGTGAACTGGGTGGCCGAGAAGG
AATGGGAGTTGCCGCCAGATTCTGACATGGATTTGAATCTGATTGAGCAGGCACCCCTGA
CCGTGGCCGAGAAGCTGCAGCGCGACTTTCTGACGGAGTGGCGCCGCGTGAGTAAGGCCC
CGGAGGCCCTCTTCTTTGTGCAATTTGAGAAGGGAGAGAGCTACTTCCACATGCACGTGC
TGGTGGAGACCACCGGGGTGAAATCCATGGTTTTGGGACGTTTCCTGAGTCAGATTCGCG
AAAAACTGATTCAGAGAATTTACCGCGGGATCGAGCCGACTTTGCCAAACTGGTTCGCGG
TTACAAAGACCCGAAATGGCGCCGGAGGCGGGAACAAGGTGGTGGATGAGTGCTACATCC
CCAATTACCTGCTCCCCAAAACCCAGCCTGAGCTCCAGTGGGCGTGGACTAATATGGAAC
AGTATTTAAGCGCCTGTTTGAATCTCGCGGAGCGTAAACGGTTGGTGGCGCAGCATCTGA
CGCACGTGTCGCAGACGCAGGAGCAGAACAAAGAGAATCAGAATCCCAATTCTGACGCGC
CGGTGATTAGATCAAAAACCTCAGCCAGATACATGGAGCTGGTCGGGTGGCTCGTGGATA
AGGGGATTACCTCGGAGAAGCAGTGGATCCAGGAGGACCAGGCCTCATACATCTCCTTCA
ATGCGGCCTCCAACTCGCGGTCCCAGATCAAGGCTGCTCTGGACAATGCGGGAAAGATCA
TGAGCCTCACTAAAACCGCCCCCGACTACCTGGTGGGCCAGCAGCCCGTGGAGGACATTT
CCAGCAATCGGATTTATAAAATCTTGGAACTGAACGGGTACGATCCCCAATACGCGGCTT
CCGTCTTTCTGGGATGGGCCACGAAAAAGTTTGGCAAGAGGAACACCATCTGGCTGTTTG
GGCCTGCAACTACCGGGAAGACCAACATCGCGGAGGCCATAGCCCACACTGTGCCCTTCT
ACGGGTGCGTAAACTGGACCAATGAGAACTTTCCCTTCAACGACTGTGTCGACAAGATGG
TGATCTGGTGGGAGGAGGGAAAGATGACCGCCAAGGTCGTGGAGTCGGCCAAAGCCATTC
TCGGAGGAAGCAAGGTGCGCGTGGACCAGAAATGCAAGTCCTCGGCCCAGATAGACCCGA
CTCCCGTGATCGTCACCTCCAACACCAACATGTGCGCCGTGATTGACGGGAACTCAACGA
CCTTCGAGCACCAGCAGCCGTTGCAAGACCGGATGTTCAAATTTGAACTCACCCGCCGTC
TGGATCATGACTTTGGGAAGGTCACCAAGCAGGAAGTCAAAGACTTTTTCCGGTGGGCAA
AGGATCACGTGGTTGAGGTGGAGCATGAATTCTACGTCAAAAAGGGTGGAGCCAAGAAAA
GACCCGCCCCCAGTGACGCAGATATAAGTGAGCCCAAACGGGCGCGCGAGTCAGTTGCGC
AGCCATCGACGTCAGACGCGGAAGCTTCGATCAACTACGCGGACAGGTACCAAAACAAAT
GTTCTCGTCACGTGGGCATGAATCTGATGCTGTTTCCGTGCAAAACCTGCGAGAGAATGA
ATCAGATTTCAAATATCTGTTTCACGCACGGTATCAAAGACTGTGGGGAGTGCTTTCCCG
TGTCAGAATCTCAACCCGTTTCTGTCGTCAAAAAGAAGACTTATCAGAAACTGTGTCCAA
TTCATCACATTTTGGGAAGAGCACCCGAGATTGCGTGTTCGGCCTGCGATCTGGCCAATG
TAGACTTGGATGACTGTGTTTCTGAACAATAAATGACTTAAACCAGGTATGGCTGCCGAT
GGTTATCTTCCAGATTGGCTCGAGGACACTCTCTCTGAAGGAATAAGACAGTGGTGGAAG
CTCAAACCTGGCCCACCACCACCAAAGCCCGCAGAGCGGCATAAGGACGACAGCAGGGGT
CTTGTGCTTCCTGGGTACAAGTACCTCGGACCCTTCAACGGACTCGACAAGGGGGAGCCG
GTCAACGAGGCAGACGCCGCGGCCCTCGAGCACGACAAGGCCTACGACCGGCAGCTCGAC
AGCGGAGACAACCCGTACCTCAAGTACAACCACGCCGACGCGGAGTTTCAGGAGCGTCTT
AAAGAAGATACGTCTTTTGGGGGCAACCTCGGACGAGCAGTCTTCCAGGCGAAAAAGAGG
GTTCTTGAACCTCTGGGCCTGGTTGAGGAACCTGTTAAGACGGCTCCGGGAAAAAAGAGG
CCGGTAGAGCACTCTCCTGTGGAACCAGACTCCTCCTCGGGAACCGGAAAAGCGGGCCAG
CAGCCTGCAAGAAAAAGACTGAATTTCGGTCAGACTGGAGACGCAGACTCCGTACCTGAC
CCCCAGCCTCTCGGACAGCCACCAGCAGCCCCCTCTGGTCTGGGAACTACTACGATGGCT
ACAGGCAGTGGCGCACCAATGGCAGACAATAACGAGGGCGCCGACGGAGTGGGTAATTCC
TCGGGAAATTGGCATTGCGATTCCACATGGATGGGCGACAGAGTCATCACCACCAGCACC
CGAACCTGGGCTCTGCCCACCTACAACAACCATCTGTACAAGCAGATTTCCAGCCAATCA
GGAGCCTCAAACGACAACCACTACTTTGGCTACAGCACCCCTTGGGGGTATTTTGACTTC
AACAGATTCCACTGCCACTTTTCACCACGTGACTGGCAAAGACTCATCAACAACAATTGG
GGATTCCGACCCAAGAGACTCAACTTCAAGCTCTTTAACATTCAAGTCAAAGAGGTCACG
CAGAATGACGGTACGACGACGATTGCCAATAACCTTACCAGCACGGTTCAGGTGTTTACT
GACTCGGAGTACCAGCTCCCGTACGTCCTCGGCTCGGCGCATCAAGGATGCCTCCCGCCG
TTCCCAGCAGACGTCTTCATGGTGCCACAGTATGGATACCTCACCCTGAACAACGGGAGT
CAAGCAGTAGGACGCTCTTCATTTTACTGCCTGGAGTACTTTCCTTCTCAGATGCTTCGT
ACCGGAAACAACTTTACCTTCAGCTATACCTTTGAGGACGTTCCTTTCCACAGCAGCTAC
GCTCACAGCCAGAGTTTGGACCGTCTCATGAATCCTCTCATCGACCAGTACCTGTATTAC
TTGAGCAGAACAAACACTCCAAGCGGAACCACCACGCAGTCCAGGCTTCAGTTTTCTCAG
GCCGGAGCGAGTGACATTCGGGACCAGTCTAGGAACTGGCTTCCTGGACCCTGTTACCGC
CAGCAGCGAGTATCAAAGACAGCTGCGGATAACAACAACAGTGAATACTCGTGGACTGGA
GCTACCAAGTACCACCTCAATGGCAGAGACTCTCTGGTGAATCCGGGCCCGGCCATGGCC
AGCCACAAGGACGATGAAGAAAAGTTTTTTCCTCAAAGCGGGGTTCTCATCTTTGGGAAG
CAAGGCTCAGAGAAAACAAATGTGGACATTGAAAAGGTCATGATTACAGACGAAGAGGAA
ATCAGGACCACCAATCCCGTGGCTACGGAGCAGTATGGTTCTGTATCTACCAACCTCCAG
AGCGGCAACACACAAGCAGCTACCGCAGATGTCAACACACAAGGCGTTCTTCCAGGCATG
GTCTGGCAGGACAGAGACGTGTACCTTCAGGGGCCCATCTGGGCAAAGATTCCACACACG
GACGGACATTTTCACCCCTCTCCCCTCATGGGCGGATTCGGACTTAAACACCCTCCTCCG
CAAATTCTCATCAAGAACACCCCGGTACCTGCGAATCCTTCGACCACCTTCAGTGCGGCA
AAGTTTGCTTCCTTCATCACACAGTATTCCACGGGACAGGTCAGCGTGGAGATCGAGTGG
GAGTTGCAGAAGGAGAACAGCAAACGCTGGAATCCCGAGATCCAGTACACTTCCAACTAC
AACAAATCTGTTAATGTGGACTTTACTGTGGACACTAATGGCGTGTATTCAGAGCCTCGC
CCCATTGGCACCAGATACCTGACTCGTAATCTGTAATTGCTTGTTAATCAATAAACCGTT
TAATTCGTTTCATTTGAACTTTGGTCTCTGCGTACTTCTTTTCTTATCTAGTTTCCATGG
CTACGTAAATAAGTACCATGGCGGGTTAATCATTAACTTTAAGGAACCCCTAGTGATGGA
GTTGGCCACTCCCTCTCTGCGCGCTCGCTCGCTCACTGAGGCCGCCCGGGCAAAGCCCGC
CCGACGCCCGGGCTTTGCCCGGGCGGCCTCAGTGAGCGAGCGAGCGCGCAGAGAGGGAGT
GGCCAA
SEQ ID NO: 79
>#1449_AAV.FL.linear [organism = Adeno-associated virus][mol_type = genomic
DNA][isolation_source = liver tissue][topology = linear]
TTGGCCACTCCCTCTCTGCGCGCTCGCTCGCTCACTGAGGCCGGGCGACCAAAGGTCGCC
CGACGCCCGGGCTTTGCCCGGGCGGCCTCAGTGAGCGAGCGAGCGCGCAGAGAGGGAGTG
GCCAACTCCATCACTAGGGGTTCCTGGAGGGGTGGAGTCGTGACGTGAAGTACGTCATAG
GGTTAGGGAGGTCCTGTATTAGAGGTCACGTGAGTGTTTTGCGACATTTTGCGACACCAT
GTGGTTACGGAGGGTATTTAAGCCCGAGTGAGCACGCAGGGTCTCCATTTTGAAGCGGGA
GGTTTGAACGCGCAGCCGCCATGCCGGGGTTTTACGAGATTGTGATTAAGGTCCCCAGCG
ACCTTGACGAGCATCTGCCCGGCATTTCTGACAGCTTTGTGAACTGGGTGGCCGAGAAGG
AATGGGAGTTGCCGCCAGATTCTGACATGGATCTGAATCTGATTGAGCAGGCACCCCTGA
CCGTGGCCGAAAAGCTGCAGCGCGACTTTCTGACAGAATGGCGCCGTGTGAGTAAGGCCC
CCGAGGCCCTTTTCTTTGTGCAATTTGAGAAGGGAGAAAGCTACTTCCACATGCACGTGC
TTGTGGAAACCACGGGGGTGAAGTCCATGGTTTTGGGACGTTTCCTGAGTCAGATTCGCG
AAAAACTGATTCAGAGAATTTACCGCGGGATCGAGCCGACTTTGCCAAACTGGTTCGCGG
TCACAAAGACCCGAAATGGCGCCGGAGGCGGGAACAAGGTGGTGGATGAGTGCTACATCC
CCAATTACCTGCTCCCCAAAACCCAGCCTGAGCTCCAGTGGGCGTGGACTAATATGGAAC
AGTATTTAAGCGCCTGTTTGAATCTCGCGGAGCGTAAACGGTTGGTGGCGCAGCATCTGA
CGCACGTGTCGCAGACCCAGGAGCAGAACAAAGAGAATCAGAATCCCAATTCTGACGCGC
CGGTGATTAGATCAAAAACCTCAGCCAGATACATGGAGCTGGTCGGGTGGCTCGTGGATA
AGGGGATTACCTCCGAGAAGCAGTGGATCCAGGAGGACCAGGCTTCATACATCTCCTTCA
ATGCGGCCTCCAACTCGCGGTCCCAAATCAAGGCTGCTCTGGACAATGCGGGAAAGATCA
TGAGCCTGACTAAAACGGCCCCCGACTACCTGGTGGGCCAGCAGCCCGTGGAGGACATTT
CCGGCAATCGGATTTATAAAATCTTGGAACTGAACGGGTATGATCCCCAATACGCGGCTT
CCGTCTTTCTGGGATGGGCCACGAAAAAGTTCGGCAAGAGGAACACCATCTGGCTGTTTG
GGCCTGCAACTACCGGGAAGACCAACATCGCGGAGGCCATAGCCCACACGGTGCCCTTCT
ACGGGTGCGTAAACTGGACCAACGAGAACTTTCCTTTCAATGATTGCGTCGACAAGATGG
TGATCTGGTGGGAGGAGGGGAAGATGACCGCCAAGGTCGTGGAGTCGGCCAAAGCCATTC
TCGGAGGAAGCAAGGTGCGCGTGGACCAGAAATGCAAGTCCTCGGCCCAGATAGACCCGA
CTCCCGTGATCGTCACCTCCAACACCAACATGTGCGCCGTGATTGACGGGAACTCAACGA
CCTTTGAGCACCAGCAGCCGTTGCAAGACCGGATGTTCAAATTTGAACTTACCCGCCGTC
TGGATCATGACTTTGGGAAGGTCACAAAGCAGGAAGTCAAAGACTTTTTCCGGTGGGCAA
AGGATCACGTGGTTGAGGTGGAGCATGAATTCTACGTCAAAAAGGGTGGAGCTAAGAAAA
GGCCCGCCCCCAGTGACGCAGATATAAGTGAGCCCAAACGGGCGCGCGAGTCAGTTGCGC
AGCCATCGACGTCAGACGCGGAAGCTTCGATCAACTACGCGGACAGGTACCAAAACAAAT
GTTCTCGTCACGTGGGCATGAATCTGATGCTGTTTCCGTGCAAAACCTGCGAGAGAATGA
ATCAGATTTCAAATGTCTGTTTCACGCACGGTGTCAAAGACTGTGGGGAGTGCTTTCCCG
TGTCAGAATCTCAACCCGTTTCTGTCGTCAAAAAGAAGACTTATCAGAAACTGTGTCCAA
TTCATCACATTTTGGGAAGAGCACCCGAGATTGCGTGTTCGGCCTGCGATCTGGCCAATG
TGGATTTGGATGACTGTGTTTCTGAACAATAAATGACTTAAACCAGGTATGGCTGCCGAT
GGTTATCTTCCAGATTGGCTCGAGGACACTCTCTCTGAAGGAATAAGACAGTGGTGGAAG
CTCAAACCTGGCCCACCACCACCAAAGCCCGCAGAGCGGCATAAGGACGACAACAGGGGT
CTTGTGCTTCCTGGGTACAAGTACCTCGGACCCTTCAACGGACTCGACAAGGGGGAGCCG
GTCAACGAGGCAGACGCCGCGGCCCTCGAGCACGACAAGGCCTACGACCGGCAGCTCGAC
AGCGGAGACAATCCGTACCTCAAGTACAACCACGCCGACGCGGAGTTTCAGGAGCGTCTT
AAAGAAGATACGTCTTTTGGGGGCAACCTCGGACGAGCAGTCTTCCAGGCGAAAAAGAGG
GTTCTTGAACCTCTGGGCCTGGTTGAGGAACCTGTTAAAACGGCTCCGGGAAAAAAGAGG
CCGGTAGAGCACTCTCCTGTGGAGCCAGACTCCTCCTCCGGAACTGGAAAGTCGGGCCAA
CAGCCTGCAAGAAAAAGATTGAATTTCGGTCAGACTGGAGACGCAGACTCCGTACCTGAC
CCCCAGCCTCTCGGACAGCCACCAGCAGCCCCCTCTGGTCTGGGAACTAATACGATGGCT
ACAGGCAGTGGCGCACCAATGGCAGACAATAACGAGGGCGCCGACGGAGTGGGTAATTCC
TCGGGAAATTGGCATTGCGATTCCACATGGATGGGCGACAGAGTCATCACCACCAGCACC
CGAACCTGGGCTCTGCCCACCTACAACAACCATCTGTACAAGCAGATTTCCAGCCAATCA
GGAGCCTCAAACGACAACCACTACTTTGGCTACAGCACCCCTTGGGGGTATTTTGACTTC
AACAGATTCCACTGCCACTTTTCACCACGTGACTGGCAAAGACTCATCAACAACAATTGG
GGATTCCGACCCAAGAGACTCAACTTCAAGCTCTTTAACATTCAAGTCAAGGAGGTCACG
CAGAATGACGGTACGACGACGATTGCCAATAACCTTACCAGCACGGTTCAGGTGTTTACT
GACTCGGAGTACCAGCTCCCGTACGTCCTCGGCTCGGCGCATCAAGGATGCCTCCCGCCG
TTCCCAGCAGACGTCTTCATGGTGCCACAGTATGGATACCTCACCCTAAACAACGGGAGT
CAAGCAGTAGGACGCTCTTCCTTTTACTGCCTGGAGTACTTTCCTTCTCAGATGCTTCGT
ACCGGAAACAACTTTACCTTCAGCTATACCTTTGAGGACGTTCCTTTCCACAGCAGCTAC
GCTCACAGCCAGAGTTTGGACCGTCTCATGAATCCTCTCATCGACCAGTACCTGTATTAC
TTGAGCAGAACAAACACTCCAAGCGGAACCACCACGCAGTCCAGGCTTCAGTTTTCTCAA
GCCGGAGCAAGTGACATTCGGGACCAGTCTAGGAACTGGCTTCCTGGACCCTGTTACCGC
CAGCAGCGAGTATCAAAGACACCTGCGGATAACAACAACAGTGAATACTCGTGGACTGGA
GCTACCAAGTACCACCTCAATGGCAGAGACTCTCTGGTAAATCCGGGCCCGGCCATGGCC
AGCCACAAGGACGATGAAGAGAAGTTTTTCCCTCAAAGCGGGGTTCTCATCTTTGGGAAG
CAAGGCTCAGAGAAAACAAATGTGGACATTGAAAAGGTCATGATTACAGACGAAGAGGAA
ATCAGGACCACCAATCCCGTGGCTACGGAGCAGTATGGTACTGTATCTACCAACCTCCAG
AGCGGCAACACACAAGCAGCTACCTCAGATGTCAACACACAAGGCATTCTTCCAGGCATG
GTCTGGCAGGACAGAGACGTGTACCTGCAGGGACCCATTTGGGCAAAGATTCCACACACG
GACGGACATTTTCACCCCTCTCCCCTCATGGGTGGATTCGGACTTAAACACCCTCCTCCA
CAGATTCTCATCAAGAACACCCCGGTACCTGCGAATCCTTCGACCACCTTCAGTGCGGCA
AAGTTTGCTTCCTTCATCACACAGTACTCCACGGGGCAGGTCAGCGTGGAGATCGAGTGG
GAGCTGCAGAAAGAGAACAGCAAACGCTGGAACCCCGAGATCCAGTACACTTCCAATTAC
AACAAATCTGTTAATGTGGACTTTACTGTGGACACTAATGGTGTGTATTCAGAGCCTCGC
CCCATTGGCACCAGATACCTGACTCGTAATCTGTAATTGCTTGTTAATCAATAAACCGTT
TAATTCGTCTCAGTTGAACTTTGGTCTCTGCGTACTTCTTTCTTATCTAGTTTCCATGGC
TACGTAGATAAGTAGCATGGCGGGTTAATCATTAACTACAAGGAACCCCTAGTGATGGAG
TTGGCCACTCCCTCTCTGCGCGCTCGCTCGCTCACTGAGGCCGGGCGACCAAAGGTCGCC
CGACGCCCGGGCTTTGCCCGGGCGGCCTCAGTGAGCGAGCGAGCGCGCAGAGAGGGAGTG
GCCAA
SEQ ID NO: 80
>#2128_AAV.FL.linear [organism = Adeno-associated virus][mol_type = genomic
DNA][isolation_source = liver tissue][topology = linear]
TTGGCCACTCCCTCTCTGCGCGCTCGCTCGCTCACTGAGGCCGGGCGACCAAAGGTCGCC
CGACGCCCGGGCTTTGCCCGGGCGGCCTCAGTGAGCGAGCGAGCGCGCAGAGAGGGAGTG
GCCAACTCCATCACTAGGGGTTCCTGGAGGGGTGGAGTCGTGACGTGAAGTACGTCATAG
GGTTAGGGAGGTCCTGTATTAGAGGTCACGTGAGTGTTTTGCGACATTTTGCGACACCAT
GTGGTTACGCAGGGTATTTAAGCCCGAGTGAGCACGCAGGGTCTCCATTTTGAAGCGGGA
GGTTTGAACGCGCAGCCGCCATGCCGGGGTTTTACGAGATTGTGATTAAGGTCCCCAGCG
ACCTTGACGAGCATCTGCCCGGCATTTCTGACAGCTTTGTGAACTGGGTGGCCGAGAAGG
AATGGGAGTTGCCGCCAGATTCTGACATGGATCTGAATCTGATTGAGCAGGCACCCCTGA
CCGTGGCCGAGAAGCTGCAGCGCGACTTTCTGACGGAGTGGCGCCGCGTGAGTAAGGCCC
CGGAGGCCCTCTTCTTTGTGCAATTTGAGAAGGGAGAGAGCTACTTCCACATGCACGTGC
TGGTGGAAACCACCGGGGTGAAATCCATGGTTTTGGGACGTTTCCTGAGTCAGATTCGCG
AAAAACTGATTCAGAGAATTTACCGCGGGATCGAGCCGACTTTGCCAAACTGGTTCGCGG
TCACAAAGACCAGAAATGGCGCCGGAGGCGGGAACAAGGTGGTGGATGAGTGCTACATCC
CCAATTACCTGCTCCCCAAAACCCAGCCTGAACTCCAGTGGACTAATATGGAACAGTATT
TAAGCGCCTGTTTGAATCTCGCGGAGCGTAAACGGTTGGTGGCGCAGCATCTGACGCACG
TGTCGCAGACGCAGGAGCAGAACAAAGAGAATCAGAATCCCAATTCTGACGCGCCGGTGA
TTAGATCAAAAACCTCAGCCAGGTACATGGAGCTGGTCGGGTGGCTCGTGGATAAGGGGA
TTACGTCGGAGAAGCAGTGGATCCAGGAGGACCAGGCCTCATACATCTCCTTCAATGCGG
CCTCCAACTCGCGGTCCCAAATCAAGGCTGCTCTGGACAATGCGGGAAAGATCATGAGCC
TGACTAAAACCGCCCCCGACTACCTGGTGGGCCAGCAGCCCGTGGAGGACATTTCCAGCA
ATCGGATTTATAAAATCTTGGAACTGAACGGGTACGATCCCCAATACGCGGCTTCCGTCT
TTCTGGGATGGGCCACGAAAAAGTTCGGCAAGAGGAACACCATCTGGCTGTTTGGGCCTG
CAACTACCGGGAAGACCAACATCGCGGAGGCCATAGCCCACACGGTGCCCTTCTACGGGT
GCGTAAACTGGACCAATGAGAACTTTCCTTTCAACGACTGTGTCGACAAGATGGTGATCT
GGTGGGAGGAGGGAAAGATGACCGCCAAGGTCGTGGAGTCGGCCAAAGCCATTCTCGGAG
GAAGCAAGGTGCGCGTGGACCAGAAATGCAAGTCCTCGGCCCAGATAGACCCGACTCCCG
TGATCGTCACCTCCAACACCAACATGTGCGCCGTGATTGACGGGAACTCAACGACCTTCG
AACACCAGCAGCCGTTGCAAGACCGGATGTTCAAATTTGAACTCACCCGCCGCCTGGATC
ATGACTTTGGGAAGGTCACCAAGCAGGAAGTCAAAGACTTTTTCCGGTGGGCAAAGGATC
ACGTGGTTGAGGTGGAGCATGAATTCTACGTCAAAAAGGGTGGAGCCAAGAAAAGGCCCG
CCCCCAGTGACGCAGATATAAGTGAGCCCAAACGGGCGCGCGAGTCAGTTGCGCAGCCAT
CGACGTCAGACGCGGAAGCTTCAATCAACTACGCGGACAGGTACCAAAACAAATGTTCTC
GTCACGTGGGCATGAATCTGATGCTGTTTCCCTGCAGACAATGCGAGAGAATGAATCAAA
ATTCAAATATCTGCTTCACTCACGGACAGAAAGACTGTTTAGAGTGCTTTCCCGTGTCAG
AATCTCAACCCGTTTCTGTCGTCAAAAAGGCGTATCAGAAACTGTGCTACATTCATCATA
TCATGGGAAAGGTGCCAGACGCTTGCACTGCCTGCGATCTGGTCAATGTGGATTTGGATG
ACTGCATCTCTGAACAATAAATGATTTAAATCAGGTATGGCTGCCGATGGTTATCTTCCA
GATTGGCTCGAGGACACTCTCTCTGAAGGAATAAGACAGTGGTGGAAGCTCAAACCTGGC
CCACCACCACCAAAGCCCGCAGAGCGGCATAAGGACGACAGCAGGGGTCTTGTGCTTCCT
GGGTACAAGTACCTCGGACCCTTCAACGGACTCGACAAGGGAGAGCCGGTCAACGAGGCA
GACGCCGCGGCCCTCGAGCACGACAAGGCCTACGACCGGCAGCTCGACAGCGGAGACAAC
CCGTACCTCAAGTACAACCACGCCGACGCGGAGTTTCAGGAGCGCCTTAAAGAAGATACG
TCTTTTGGGGGCAACCTCGGACGAGCAGTCTTCCAGGCGAAAAAGAGGGTTCTTGAACCT
CTGGGCCTGGTTGAGGAACCTGTTAAGACGGCTCCGGGAAAAAAGAGGCCGGTAGAGCAC
TCTCCTGCGGAGCCAGACTCCTCCTCGGGAACCGGAAAGGCGGGCAACCAGCCTGCAAGA
AAAAGATTGAATTTCGGTCAGACTGGAGACGCAGACTCCGTACCTGACCCCCAACCTCTC
GGACAGCCACCAGCAGCCCCCTCTGGTCTGGGAACTAATACGATGGCTACAGGCAGTGGC
GCACCAATGGCAGACAATAACGAGGGCGCCGACGGAGTGGGTAATTCCTCGGGAAATTGG
CATTGCGATTCCACATGGATGGGCGACAGAGTCATCACCACCAGCACCCGAACCTGGGCT
CTGCCCACCTACAACAACCATCTCTACAAGCAGATTTCCAGCCAGTCTGGAGCCTCAAAC
GACAACCACTACTTTGGCTACAGCACCCCTTGGGGGTATTTTGACTTCAACAGATTCCAC
TGCCACTTTTCACCACGTGACTGGCAAAGACTCATCAACAACAACTGGGGATTCCGACCC
AAGAGACTCAACTTCAAGCTCTTTAACATTCAAGTCAAAGAGGTCACGCAGAATGACGGT
ACGACGACGATTGCCAATAACCTTACCAGCACGGTTCAGGTGTTTACTGACTCGGAGTAC
CAGCTCCCGTACGTCCTCGGCTCGGCGCATCAAGGATGCCTCCCGCCGTTCCCAGCAGAC
GTCTTCATGGTGCCACAGTATGGATACCTCACCCTGAACAACGGAAGTCAGGCAGTAGGA
CGCTCTTCATTTTACTGCCTGGAGTACTTTCCTTCTCAAATGCTGCGTACCGGAAACAAC
TTTACCTTCAGCTACACATTTGAAGACGTGCCTTTCCACAGCAGCTACGCTCACAGCCAG
AGTTTGGACCGTCTCATGAATCCTCTCATCGACCAGTACCTGTATTACTTGAGCAGAACA
AACACTCCAAGCGGAACCACCACGCAGTCCAGGCTTCAGTTTTCTCAGGCCGGAGCAAGT
GACATTCGGGACCAGTCTAGGAACTGGCTTCCTGGACCCTGTTACCGCCAGCAGCGAGTA
TCAAAGACATCTGCAGATAACAACAATAGTGAATACTCGTGGACTGGAGCTACCAAGTAC
CACCTCAATGGCAGAGACTCTCTGGTGAATCCGGGCCCGGCCATGGCCAGCCACAAGGAC
GATGAAGAAAAGTTTTTTCCTCAGAGCGGGGTTCTCATCTTTGGAAAGCAAGGTTCAGAG
AAAACAAATGTGGAAAAGGTCATGATTACAGACGAAGAGGAAATCAGGACCACCAATCCC
GTGGCTACGGAGCAGTATGGTGCTGTATCTACCAACCTCCAGAGCGGCAACACACAAGCA
GCTACCGCAGATGTCAACACACAAGGCGTTCTTCCAGGCATGGTCTGGCAGGACAGAGAC
GTGTACCTGCAGGGGCCCATCTGGGCAAAGATTCCCCACACGGATGGACACTTTCACCCT
TCTCCTCTTATGGGAGGATTTGGACTTAAACACCCTCCCCCGCAGATTCTCATCAAGAAC
ACCCCGGTACCTGCGAATCCTTCGACCACCTTTAGTGCGGCAAAGTTTGCTTCCTTCATC
ACACAGTATTCCACGGGGCAGGTCAGTGTGGAGATCGAGTGGGAGCTGCAGAAGGAGAAC
AGCAAGCGCTGGAACCCCGAGATCCAATACACTTCCAACTACAACAAATCTGTTAATGTG
GACTTTACTGTGGACACTAATGGCGTGTATTCAGAGCCTCGCCCCATTGGCACCAGATAC
CTGACTCGTAATCTGTAATTGCTTGTTAATCAATAAACCGTTTAATTCGTTTCAATTGAA
CTTTGGTCTCTGCGTACTTCTTTCTTATATAGTTTCCATGGCTACGTAGATAAGTAGCAT
GGCGGGTTAATCATTAACACAAGGAACCCCTAGTGATGGAGTTGGCCACTCCCTCTCTGC
GCGCTCGCTCGCTCACTGAGGCCGGGCGACCAAAGGTCGCCCGACGCCCGGGCTTTGCCC
GGGCGGCCTCAGTGAGCGAGCGAGCGCGCAGAGAGGGAGTGGCCAA
SEQ ID NO: 81
>#2141_AAV.FL.linear [organism = Adeno-associated virus][mol_type = genomic
DNA][isolation_source = liver tissue][topology = linear]
TTGGCCACTCCCTCTCTGCGCGCTCGCTCGCTCACTGAGGCCGGGCGACCAAAGGTCGCC
CGACGCCCGGGCTTTGCCCGGGCGGCCTCAGTGAGCGAGCGAGCGCGCAGAGAGGGAGTG
GCCAACTCCATCACTAGGGGTTCCTGGAGGGGTGGAGTCGTGACGTGAAGTACGTCATAG
GGTTAGGGAGGTCCTGTATTAGAGGTCACGTGAGTGTTTTGCGACATTTTGCGACACCAT
GTGGTCACGCTGGGTATTTAAGCCCGAGTGAGCACGCAGGGTCTCCATTTTGAAGCGGGA
GGTTTGAACGCGCAGCCGCCATGGGCAAAGTTTACGAGATTGTGATTAAGGTCCCCAGCG
ACCTTGACGAGCATCTGCCAGGCATTTCTGACAGCTTTGTGAACTGGGTGGCCGAGAAGG
AATGGGAGTTGCCGCCAGATTCTGACATGGATCTGAATCTGATTGAGCAGGCACCCCTGA
CCGTGGCCGAGAAGCTGCAGCGCGACTTTCTGACGGAGTGGCGCCGCGTGAGTAAGGCCC
CGGAGGCCCTTTTCTTTGTGCAATTTGAGAAGGGAGAGAGCTACTTCCACATGCACGTGC
TGGTGGATACCACCGGGGTGAAATCCATGGTTTTGGGACGTTTCCTGAGTCAGATTCGCG
AAAAACTGATTCAGAGAATTTACCGCGGGATCGAGCCGACTTTGCCAAACTGGTTCGCGG
TCACAAAGACCCGAAATGGCGCCGGAGGCGGGAACAAAGTTGTGGATGAGTGCTACATCC
CCGATTACCTGCTCCCCAAAACCCAGCCTGAGCTCCAGTGGGCGTGGACTAATATGGAAC
AGTATTTAAGCGCCTGTTTGAATCTCGCGGAGCGTAAACGGTTGGTGGCGCAGCATCTGA
CGCACGTGTCGCAGACGCAGGAGCAGAACAAAGAGAATCAGAATCCTAATTCTGACGCGC
CGGTGATCAGATCAAAACCCTCAGCCAGGTACATGGAGCTGGTCGGGTGGCTCGTGGATA
AGGGGATTACGTCGGAGAAGCAGTGGATCCAGGAGGACCAGGCCTCCTACATCTCCTTCA
ATGCGGCCTCCACCTCGCGGTCCCAAATCAAGGCTGCCTTGGACAATGCGGGGAAGATCA
TGAGCCTGACTAAAACTGCCCCCGACTACCTGGTGGGCCAGCAGCCCGTGGAGGACATTT
CCAGCAATCGGATTTATAAAATCTTGGAACTGAACGGGTACGATCCCCAATACGCGGCTT
CCGTCTTTCTGGGATGGGCCACGAAAAAGTTTGGCAAGAGGAACACCATCTGGCTGTTTG
GGCCTGCAACTACCGGGAAGACCAACATCGCGGAGGCCATAGCCCACACTGTGCCCTTCT
ACGGGTGCGTAAACTGGACCAATGAGAACTTTCCTTTCAACGACTGTGTCGACAAGATGG
TGATCTGGTGGGAGGAGGGGAAGATGACCGCCAAGGTCGTGGAGTCGGCCAAAGCCATTC
TCGGAGGAAGTAAGGTGCGCGTGGACCAGAAATGCAAGTCCTCGGCCCAGATAGACCCGA
CTCCTGTGATCGTCACCTCCAACACCAACATGTGCGCCGTGATTGACGGGAACTCAACGA
CCTTCGAGCACCAGCAGCCGTTGCAAGACCGGATGTTCAAATTTGAACTCACCCGCCGTC
TGGATCATGACTTTGGGAAGGTCACCAAGCAGGAAGTCAAAGACTTTTTCCGGTGGGCAA
AGGATCACGTGGTTGAGGTGGAGCATGAATTCTACGTCAAAAAGGGTGGAGCCAAGAAAA
GACCCGCCCCCAGTGACGCAGATATAAGTGAGCCCAAACGGGCGCGCGAGTCAGTTGCGC
AGCCATCGACGTCAGACGCGGAAGCTTCGATCAACTACGCGGACAGGTATCAAAACAAAT
GTTCTCGTCACGTGGGCATGAATCTGATGCTGTTTCCCTGCAGACAATGCGAGAGAATGA
ATCAGAATTCAAATATCTGCTTCACTCACGGACAGAAAGACTGTTTAGAGTGCTTTCCCG
TGTCAGAATCTCAACCCGTTTCTGTCGTCAAAAAGGCGTATCAGAAACTGTGCTACATTC
ATCATATCATGGGAAAGGTACCAGACGCTTGCACTGCCTGCGATCTGGTCAATGTGGATT
TGGATGACTGCATCTCTGAACAATAAATGATTTAAATCAGGTATGGCTGCCGATGGTTAT
CTTCCAGATTGGCTCGAGGACACTCTCTCTGAAGGAATAAGACAGTGGTGGAAGCTCAAA
CCTGGCCCACCACCACCAAAGCCCGCAGAGCGGCATAAGGACGACAGCAGGGGTCTTGTG
CTTCCTGGGTACAAGTACCTCGGACCCTTCAACGGACTCGACAAGGGAGAGCCGGTCAAC
GAGGCAGACGCCGCGGCCCTCGAGCACGACAAGGCCTACGACCGGCAGCTCGACAGCGGA
GACAACCCGTACCTCAAGTACAACCACGCCGACGCGGAGTTTCAGGAGCGCCTTAAAGAA
GATACGTCTTTTGGGGGCAACCTCGGACGAGCAGTCTTCCAGGCGAAAAAGAGGGTTCTT
GAACCTCTGGGCCTGGTTGAGGAGCCTGTTAAAACGGCTCCGGGAAAAAAGAGGCCGGTA
GAGCACTCTCCTGTGGAGCCAGACTCCTCCTCGGGAACCGGAAAGGCGGGCAACCAGCCT
GCAAGAAAAAGATTGAATTTCGGTCAGACTGGAGACGCAGACTCCGTACCTGACCCCCAG
CCTCTCGGACAGCCACCAGCAGCCCCCTCTGGTCTGGGAACTAATACGATGGCTACAGGC
AGTGGCGCACCAATGGCAGACAATAACGAGGGCGCCGACGGAGTGGGTAATTCCTCGGGA
AATTGGCATTGCGATTCCACATGGATGGGCGACAGAGTCATCACCACCAGCACCCGAACC
TGGGCCCTGCCCACCTACAACAACCACCTCTACAAACAAATTTCCAGCCAATCAGGAGCC
TCGAACGACAACCACTACTTTGGCTACAGCACCCCCTGGGGGTATTTTGACTTCAACAGA
TTCCACTGCCACTTTTCACCACGTGACTGGCAAAGACTCATCAACAACAACTGGGGATTC
CGGCCCAAGAGACTCAACTTCAAGCTCTTTAACATTCAAGTCAAAGAGGTCACGCAGAAT
GACGGTACGACGACGATTGCCAATAACCTTACCAGCACGGTTCAGGTGTTTACTGACTCG
GAGTACCAGCTCCCGTACGTCCTCGGCTCGGCGCATCAAGGATGCCTCCCGCCGTTCCCA
GCAGACGTCTTCATGGTCCCACAGTATGGATACCTCACCCTGAACAACGGGAGTCAGGCA
GTAGGACGCTCTTCATTTTACTGCCTGGAGTACTTTCCTTCTCAGATGCTGCGTACCGGA
AACAACTTTACCTTCAGCTATACCTTTGAGGATGTTCCGTTCACAAGCAGATACGCTCAC
AGCCAGAGTTTGGACCGTCTCATGAATCCTCTCATCGACCAGTACCTGTATTACTTGAGC
AGAACAAACACTCCAAGTGGAACCACCACGCAGTCAAGGCTTCAGTTTTCTCAGGCCGGA
GCGAGTGACATTCGGGATCAGTCTAGGAACTGGCTTCCTGGACCCTGTTATCGCCAGCAG
CGAGTATCAAAGACATCTGCGGATAACAACAACAGTGAATACTCGTGGACTGGAGCTACC
AAGTACCACCTCAATGGCAGAGACTCTCTGGTGAATCCGGGCCCGGCCATGGCCAGTCAC
AAAGACGATGAAGAAAAGTTTTTTCCTCAGAGCGGGGTTCTCATCTTTGGGAAGCAAGGC
TCAGAGAAAACAAATGTGGACATTGAAAAGGTCATGATTACAGACGGAGAGGAAATCAGG
ACCACCAATCCCGTCGCCACGGAGCAGTATGGTTCTGTATCTACCAACCTCCAGAGAGGC
AACACACAAGCAGCTACCGCAGATGTCAACACACAAGGCGTTCTTCCAGGCATGGTCTGG
CAGGACAGAGACGTGTACCTGCAGGGGCCTATCTGGGCAAAGATTCCACACACGGACGGA
CATTTTCACCCCTCTCCCCTCATGGGCGGATTTGGACTTAAACACCCTCCCCCGCAGATT
CTCATCAAGAACACCCCGGTACCTGCGAATCCTTCGACCACCTTCAGTGCGGCAAAGTTT
GCTTCCTTTATCACACAGTACTCCACGGGGCAGGTCAGCGTGGAGATCGAGTGGGAGCTG
CAGAAGGAGAACAGCAAACGCTGGAATCCCGAGATTCAGTACACTTCCAACTACAACAAG
TCTGTTAATGTGGACTTTACTGTGGACACTAATGGTGTGTATTCAGAGCCTCGCCCCATT
GGCACCAGATACCTGACTCGTAATCTGTAATTGCTTGTTAATCAATAAACCGTGTAATTC
GTTTCAGTTGAACTTTGGTCTCTGCGTACTTCTTTCTTATCTAGTTTCCATGGCTACGTA
GATAAGTACCATGGCGGGTTAATCATTAACTATAAGGAACCCCTAGTGATGGAGTTGGCC
ACTCCCTCTCTGCGCGCTCGCTCGCTCACTGAGGCCGGGCGACCAAAGGTCGCCCGACGC
CCGGGCTTTGCCCGGGCGGCCTCAGTGAGCGAGCGAGCGCGCAGAGAGGGAGTGGCCAA
SEQ ID NO: 82
>#1343_AAV.FL.linear [organism = Adeno-associated virus][mol_type = genomic
DNA][isolation_source = liver tissue][topology = linear]
TTGGCCACTCCCTCTCTGCGCGCTCGCTCGCTCACTGAGGCCGGGCGACCAAAGGTCGCC
CGACGCCCGGGCTTGGCTCGGGCGGCCTCAGTGAGCGAGCGAGCGCGCAGAGAGGGAGTG
GCCAACTCCATCACTAGGGGTTCCTGGAGGGGTGGAGTCGTGACGTGAAGTACGTCATAG
GATTAGGGAGGTCCTGTATTAGAGGTCACGTGAGTGTTTTGCGACATTTTGCGACACCAT
GTGGTCACGCTGGGTATTTAAGCCCGAGTGAGCACGCAGGGTCTCCATTTTGAAGCGGGA
GGTTTGAACGCGCAGCCGCCATGCCGGGGTTTTACGAGATTGTGATTAAGGTCCCCAGCG
ACCTTGACGAGCATCTGCCCGGCATTTCTGACAGCTTTGTGAACTGGGTGGCCGAGAAGG
AATGGGAGTTGCCGCCAGATTCTGACATGGATTTGAATCTGATTGAGCAGGCACCCCTGA
CCGTGGCCGAGAAGCTGCAGCGCGACTTTCTGACGGAATGGCGCCGCGTGAGTAAGGCCC
CGGAGGCCCTCTTCTTTGTGCAATTTGAAAAGGGAGAGAGCTACTTCCACATGCACGTGC
TGGTGGAGACCACCGGGGTGAAATCCATGGTTTTGGGACGTTTCCTGAGTCAGATTCGCG
AAAAACTGATTCAGAGAATTTACCGCGGGATCGAGCCGACTTTGCCAAACTGGTTCGCGG
TCACAAAGACCCGAAATGGCGCCGGAGGCGGGAACAAGGTGGTGGATGAGTGCTACATCC
CCAATTACCTGCTCCCCAAAACCCAGCCTGAGCTCCAGTGGGCGTGGACTAATATGGAAC
AGTATTTAAGCGCCTGTTTGAATCTCGCGGAGCGTAAAAGGTTGGTGGCGCAGCATCTGA
CGCACGTGTCGCAGACGCAGGAGCAGAACAAAGAGAATCAGAATCCCAATTCTGACGCGC
CGGTGATTAGATCAAAAACCTCAGCCAGATACATGGAGCTGGTCGGGTGGCTCGTGGATA
AGGGGATTACCTCGGAGAAGCAGTGGATCCAGGAGGACCAGGCCTCATACATCTCCTTCA
ATGCGGCCTCCAACTCGCGGTCCCAAATCAAGGCTGCTCTGGACAATGCGGGAAAGATCA
TGAGCCTGACTAAAACCGCCCCCGACTACCTGGTGGGCCAGCAGCCCGTGGAGGACATTT
CCAGCAATCGGATTTATAAAATCTTGGAACTGAACGGGTACGATCCCCAATACGCGGCTT
CCGTATTTCTGGGATGGGCCACGAAAAAGTTCGGCAAGAGAAACACCATCTGGCTGTTTG
GGCCTGCAACTACCGGGAAGACCAACATCGCGGAGGCTATAGCCCACACTGTGCCCTTCT
ACGGGTGCGTAAACTGGACCAATGAGAACTTTCCTTTCAACGACTGTGTCGACAAGATGG
TGATCTGGTGGGAGGAGGGGAAGATGACCGCCAAGGTCGTGGAGTCGGCCAAAGCCATTC
TCGGAGGAAGCAAGGTGCGCGTGGACCAGAAATGCAAGTCCTCGGCCCAAATAGACCCGA
CTCCCGTGATCGTCACCTCCAACACCAACATGTGCGCCGTGATTGACGGGAACTCAACGA
CCTTCGAACACCAGCAGCCGTTGCAAGACCGGATGTTCAAATTTGAACTCACCCGCCGTC
TGGATCATGACTTTGGGAAGGTCACCAAGCAGGAAGTCAAAGACTTTTTCCGGTGGGCAA
AGGATCACGTGGTTGAGGTGGAGCATGAATTCTACGTCAAAAAGGGTGGAGCCAAGAAAA
GGCCCGCCCCCAGTGACGCAGATATAAGTGAGCCCAAACGGGCGCGCGAGTCAGTTGCGC
AGCCATCGACGTCAGACGCGGAAGCTTCGATCAACTACGCGGACAGGTACCAAAACAAAT
GTTCTCGTCACGTGGGCATGAATCTGATGCTGTTTCCCTGCAGACAATGCGAGAGAATGA
ATCAAAATTCAAATATTTGTTTCACTCACGGACAGAAAGACTGTTTGGAGTGCTTTCCCG
TGTCAGAATCTCAACCCGTTTCTGTCGTCAAAAAGGCGTATCAGAAACTGTGCTATATTC
ATCATATCATGGGAAAGGTACCAGACGCTTGCACTGCTTGCGACCTGGTCAATGTGGATT
TGGATGACTGCATCTCTGAACAATAAATGATTTAAATCAGGTATGGCTGCCGATGGTTAT
CTTCCAGATTGGCTCGAGGACACTCTCTCTGAAGGAATAAGACAGTGGTGGAAGCTCAAA
CCTGGCCCACCACCACCAAAGCCCGCAGAGCGGCATAAGGACGACAGCAGGGGTCTTGTG
CTTCCTGGGTACAAGTACCTCGGACCCTTCAACGGACTCGACAAGGGGGAGCCGGTCAAC
GAGGCAGACGCCGCGGCCCTCGAGCACGACAAGGCCTACGACCGGCAGCTCGACAGCGGA
GACAACCCGTACCTCAAGTACAACCACGCCGACGCGGAGTTTCAGGAGCGCCTTAAAGAA
GATACGTCTTTTGGGGGAAACCTCGGACGAGCAGTCTTCCAGGCGAAAAAGAGGGTTCTT
GAACCTCTGGGCCTGGTTGAGGAGCCTGTTAAAACGGCTCCGGGAAAAAAGAGGCCGGTA
GAGCACTCTCCTGTGGAGCCAGACTCCTCCTCGGGAACCGGAAAAGCGGGCCAGCAGCCT
GCGAGAAAGAGATTGAATTTCGGTCAGACTGGAGACGCAGACTCCGTACCTGACCCCCAG
CCTCTCGGACAGCCACCAGCAGCCCCCTCTGGTCTGGGAACTAATACGATGGCTACAGGC
AGTGGCGCACCAATGGCAGACAATAACGAGGGCGCCGACGGAGTGGGTAATTCCTCGGGA
AATTGGCATTGCGATTCCACATGGATGGGCGACAGAGTCATCACCACCAGCACCCGCACC
TGGGCTCTGCCCACCTACAACAACCATCTGTACAAGCAGATTTCCAGCCAATCAGGAGCA
TCGAACGACAACCACTACTTTGGCTACAGCACCCCCTGGGGGTATTTTGACTTCAACAGA
TTCCACTGCCATTTCTCCCCACGTGACTGGCAAAGACTCATCAACAACAATTGGGGATTC
CGACCCAAGAGACTCAACTTCAAGCTCTTTAACATTCAAGTCAAGGAGGTCACGCAGAAT
GACGGTACGACGACGATTGCCAATAACCTTACCAGCACGGTTCAGGTGTTTACTGACTCG
GAGTACCAGCTCCCGTACGTCCTCGGCTCGGCGCATCAAGGATGCCTCCCGCCGTTTCCA
GCGGACGTCTTCATGGTCCCACAGTATGGATACCTCACCCTGAACAACGGGAGTCAGGCG
GTAGGACGCTCTTCCTTTTACTGCCTGGAGTACTTTCCTTCTCAGATGCTGCGTACCGGA
AACAACTTTACCTTCAGCTACACCTTTGAGGACGTTCCTTTCCACAGCAGCTACGCTCAC
AGCCAGAGTTTGGACCGGCTGATGAATCCTCTGATCGACCAGTATCTGTATTACTTGAGC
AAAACAAACGCTCCAAGCGGAACCACCACGATGTCCAGGCTTCAGTTTTCTCAGGCAGGA
GCAAGTGACATTCGGGACCAGTCTAGAAACTGGCTTCCTGGACCCTGTTACCGCCAGCAG
CGAGTATCAAAGACAGCTGCGGACAACAACAACAGTGATTACTCGTGGACTGGAGCTACC
AAGTACCACCTCAATGGAAGAGACTCTCTGGTGAATCCGGGCACAGCCATGGCCAGCCAC
AAGGACGATGAAGAAAAGTATTTTCCTCAGAGCGGGGTTCTCATCTTCGGAAAACAAGAT
TCGGGAAAAACTAATGTGGACATTGAAAAGGTCATGATTACAGACGAAGAGGAAATCAGG
ACCACCAATCCCGTGGCTACGGAGCAGTATGGTTCTGTATCTACCAACCTCCAAAGCGGC
AACACACAAGCAGCTACCTCAGATGTCAACACACAAGGCGTTCTTCCAGGCATGGTCTGG
CAGGACAGAGACGTGTACCTGCAGGGACCCATCTGGGCAAAGATTCCACACACGGACGGA
CATTTTCACCCTTCTCCTCTTATGGGAGGATTTGGACTGAAGCACCCCCCCCCGCAGATT
CTCATCAAGAATACCCCGGTACCTGCGAATCCTTCTACCACCTTCAGCGCGGCAAAGTTT
GCTTCCTTCATCACACAGTACTCCACGGGGCAGGTCAGCGTGGAGATCGAGTGGGAGCTG
CAGAAAGAGAACAGCAAACGCTGGAACCCCGAGATCCAGTACACTTCCAACTACAACAAG
TCTGTTAATGTGGACTTTACTGTGGACACTAATGGTGTGTATTCAGAGCCTCGCCCCATT
GGCACCAGATACCTGACTCGTAATCTGTAATTGCTTGTTAATCAATAAACCGTTTAATTC
GTTTCAGTTGAACTTTGGTCTCTGCGTACTTCTTTCTTATCTAGTTTCCATGGCTACGTA
GATAAGTAGCCTGGCGGGTTAATCATTAACTACAAGGAACCCCTAGTGATGGAGTTGGCC
ACTCCCTCTCTGCGCGCTCGCTCGCTCACTGAGGCCGGGCGACCAAAGGTCGCCCGACGC
CCGGGCTTTGCCCGGGCGGCCTCAGTGAGCGAGCGAGCGCGCAGAGAGGGAGTGGCCAA
SEQ ID NO: 83
>#777_AAV.FL.linear [organism = Adeno-associated virus][mol_type = genomic DNA]
[isolation_source = liver tissue][topology = linear]
TTGGCCACTCCCTCTCTGCGCGCTCGCTCGCTCACTGAGGCCGGGCGACCAAAGGTCGCC
CGACGCCCGGGCTTTGCCCGGGCGGCCTCAGTGAGCGAGCGAGCGCGCAGAGAGGGAGTG
GCCAACTCCATCACTAGGGGTTCCTGGAGGGGTGGAGTCGTGACGTGAAGTACGTCATAG
GGTTAGGGAGGTCCTGTATTAGAGGTCACGTGAGTGTTTTGCGACATTTTGCGACACCAT
GTGGTCACGCTGGGTATATAAGCCCGAGTGAGCACGCAGGGTCTCCATTTTGAAGCGGGA
GGTTTGAACGCGCAGCCGCCATGCCGGGGTTTTACGAGATTGTGATTAAGGTCCCCAGCG
ACCTTGACGAGCATCTGCCCGGCATTTCTGACAGCTTTGTAAACTGGGTGGCCGAGAAGG
AATGGGAGTTGCCGCCAGATTCTGACATGGATCTGAATCTGATTGAGCAGGCACCCCTGA
CCGTGGCCGAAAAGCTGCAGCGCGACTTTCTGACGGAGTGGCGCCGTGTGAGTAAGGCTC
CGGAAGCCCTTTTCTTTGTGCAATTTGAGAAAGGGGAGAGCTACTTCCACATGCACGTGC
TTGTGGAGACCACCGGGGTGAAATCCATGGTCTTGGGACGTTTCCTGAGTCAGATTCGCG
AAAAACTGATTCAGAGAATTTACCGCGGGATCGAGCCGACTTTGCCAAATTGGTTCGCGG
TCACAAAGACCCGAAATGGCGCCGGAGGCGGGAACAAGGTGGTGGATGAGTGCTATATCC
CCAATTACCTGCTCCCCAAAACCCAGCCTGAGCTCCAGTGGGCGTGGACTAATATGGAAC
AGTATTTAAGCGCCTGTTTGAATCTCGCGGAGCGTAAACGGTTGGTGGCGCAGCATCTGA
CGCACGTGTCGCAGACGCAGGAGCAGAACAAAGAGAATCAGAATCCCAATTCTGACGCGC
CGGTGATCAGATCAAAAACCTCAGCCAGGTACATGGAGCTGGTCGGGTGGCTCGTGGATA
AGGGGATTACCTCGGAGAAGCAGTGGATCCAGGAGGACCAGGCTTCATACATCTCCTTCA
ATGCGGCCTCCAACTCGCGGTCCCAAATCAAGGCTGCTTTGGACAATGCGGGAAAGATCA
TGAGCCTCACTAAAACCGCCCCCGACTACCTGGTGGGCCAACAGCCCGTGGAGGACATTT
CCAGCAATCGGATTTATAAAATCTTGGAACTGAACGGGTATGATCCCCAATATGCGGCTT
CCGTCTTCCTGGGATGGGCCACGAAAAGGTTCGGCAAGAGGAACACCATCTGGCTGTTTG
GGCCTGCGACTACCGGGAAGACCAACATCGCGGAGGCTATAGCCCACACTGTGCCTTTTT
ACGGGTGCGTAAACTGGACCAATGAGAACTTTCCGTTCAACGACTGCGTCGACAAGATGG
TGATCTGGTGGGAGGAGGGGAAGATGACCGCCAAGGTTGTGGAGTCGGCCAAGGCCATCC
TCGGTGGGAGCAAGGTGCGCGTGGACCAGAAATGCAAGTCCTCGGCCCAGATAGACCCGA
CTCCTGTGATCGTCACCTCCAACACCAACATGTGCGCCGTGATTGACGGGAACTCAACGA
CCTTCGAGCACCAGCAGCCGTTGCAAGACCGGATGTTCAAATTTGAACTCACCCGCCGTC
TGGATCATGACTTTGGGAAGGTCACCAAGCAGGAAGTTAAAGACTTTTTCCGGTGGGCCC
AAGACCACGTGGTAGAGGTGGAGCATGAATTCTACGTCAAAAAGGGTGGAGCTAAGAAAA
GGCCCGCCCCCAGTGACGCAGATATAAGTGAGCCCAAACGGGCGCGCGAGTCAGTTGCGC
AGCCATCGACGTCAGACGCGGAAGCTTCGATCAACTACGCGGACAGGTACCAAAACAAAT
GTTCTCGTCACGTGGGCATGAATCTGATGCTGTTTCCCTGCAGACAATGCGAGAGAATGA
ATCAGAATTCAAATATCTGCTTCACTCACGGACAAAAAGACTGCCTAGAGTGCTTTCCCG
TGTCAGAATCTCAACCCGTTTCTGTCGTCAAAAAGGCGTATCAGAAACTGTGCTATATTC
ATCATATCATGGGAAAGGTACCAGATGCTTGCACTGCTTGCGACCTGGTCAATGTGGATT
TGGATGACTGCATCTCTGAACAATAAATGATTTAAATCAGGTATGGCTGCCGATGGTTAT
CTTCCAGATTGGCTCGAGGACACTCTCTCTGAAGGAATAAGACAGTGGTGGAAGCTCAAA
CCTGGCCCACCACCACCAAAGCCCGCAGAGCGGCACAAGGACGACAGCAGGGGTCTTGTG
CTTCCTGGGTACAAGTACCTCGGACCCTTCAACGGACTCGACAAAGGAGAGCCGGTCAAC
GAGGCAGACGCCGCGGCCCTCGAGCACGACAAGGCCTACGACCGGCAGCTCGACAGCGGA
GACAACCCGTACCTCAAGTACAACCACGCCGACGCGGAGTTTCAGGAGCGTCTTAAAGAA
GATACGTCTTTTGGGGGCAACCTCGGACGAGCAGTCTTCCAGGCGAAAAAGAGGGTTCTT
GAACCTCTGGGCCTGGTTGAGGAGCCTGTTAAAACGGCTCCGGGAAAAAAGAGGCCGGTA
GAGCACTCTCCTGTGGAGCCAGACTCCTCCTCGGGAACCGGAAAAGCGGGCCAGCAGCCT
GCGAGAAAGAGATTGAATTTCGGTCAGACTGGAGACGCAGACTCCGTACCTGACCCCCAG
CCTCTCGGACAGCCACCAGCAGCCCCCTCTGGTCTGGGAACTAATACGATGGCTACAGGC
AGTGGCGCACCAATGGCAGACAATAACGAGGGCGCCGACGGAGTGGGTAATTCCTCGGGA
AATTGGCATTGCGATTCCACATGGATGGGCGACAGAGTCATCACCACCAGCACCCGCACC
TGGGCTCTGCCCACCTACAACAACCATCTGTACAAGCAGATTTCCAGCCAATCAGGAGCA
TCGAACGACAACCACTACTTTGGCTACAGCACCCCTTGGGGGTATTTTGACTTCAACAGA
TTCCACTGCCACTTCTCCCCACGTGACTGGCAAAGACTCATCAACAACAATTGGGGATTC
CGGCCCAAAAGACTCAACTTCAAGCTCTTTAACATTCAAGTCAAGGAGGTCACGCAGAAT
GACGGTACGACGACGATTGCCAATAACCTTACCAGCACGGTTCAGGTGTTTACTGACTCG
GAGTACCAGCTCCCGTACGTCCTCGGCTCGGCGCATCAAGGATGCCTCCCGCCGTTTCCA
GCGGACGTCTTCATGGTCCCACAGTATGGATACCTCACCCTGAACAACGGGAGTCAGGCG
GTAGGACGCTCTTCCTTTTACTGCCTGGAGTACTTTCCTTCTCAGATGCTGCGTACCGGA
AACAACTTTACCTTCAGCTACACCTTTGAGGACGTTCCTTTCCACAGCAGCTACGCTCAC
AGCCAGAGTTTGGACCGGCTGATGAATCCTCTGATCGACCAGTATCTGTATTACTTGAGC
AAAACAAACGCTCCAAGCGGAACCACCACGATGTCTAGGCTTCAGTTTTCTCAGGCCGGA
GCAAGTGACATTCGGGACCAGTCTAGAAACTGGCTTCCTGGACCCTGTTACCGCCAGCAG
CGAGTATCAAAGACAGCTGCGGACAACAACAACAGTGATTACTCGTGGACTGGAGCTACC
AAGTACCACCTCAATGGAAGAGACTCTCTGGTGAATCCGGGCACAGCCATGGCCAGCCAC
AAGGACGATGAAGAAAAGTATTTTCCTCAGAGCGGGGTTCTCATCTTCGGAAAACAAGAC
TCGGGAAAAACTAATGTGGACATTGAAAAGGTCATGATTACAGACGAAGAGGAAATCAGG
ACCACCAATCCCGTGGCTACGGAGCAGTATGGTTCTGTATCTACCAACCTCCAAAGCGGC
AACACACAAGCAGCTACCTCAGATGTCAACACACAAGGCGTTCTTTCAGGCATGGTCTGG
CAGGACAGAGACGTGTACCTGCAGGGGCCCATCTGGGCAAAGATTCCCCACACGGATGGA
CACTTTCACCCTTCCCCGCTCATGGGAGGATTTGGACTTAAACACCCTCCCCCGCAGATT
CTCATCAAGAATACCCCCGTACCTGCGAATCCTTCGACCACCTTCAGTGCGGCAAAGTTT
GCTTCCTTCATCACACAGTATTCCACGGGGCAGGTCAGCGTGGAGATCGAGTGGGAGCTG
CAGAAAGAGAACAGCAAACGCTGGAACCCCGAGATCCAGTACACTTCCAACTACAACAAG
TCTGTTAATGTGGACTTTACTGTGGACACTAATGGTGTGTATTCAGAGCCTCGCCCCATT
GGCACCAGATACCTGACTCGTAATCTGTAATTGCTTGTTAATCAATAAACCGTTTAATTC
GTTTCAGTTGAACTTTGGTCTCTGCGTACTTCTTTCTTATCTAGTTTCCATGGCTACGTA
GATAAGTAGCCTGGCGGGTTAATCATTAACTACAAGGAACCCCTAGTGATGGAGTTGGCC
ACTCCCTCTCTGCGAGCGAGCTCGCTCACTGAGGCCGGGCGACCAAAGGTCGCCCGACGC
CCGGGCTTTGCCCGGGCGGCCTCAGTGAGCGAGCGAGCGCGCAGAGAGGGAGTGGCCAA
SEQ ID NO: 84
>#3511_AAV.FL.linear [organism = Adeno-associated virus][mol_type = genomic
DNA][isolation_source = liver tissue][topology = linear]
TTGGCCACTCCCTCTCTGCGCGCTCGCTCGCTCACTGAGGCCGGGCGACCAAAGGTCGCC
CGACGCCCGGGCTTTGCCCGGGCGGCCTCAGTGAGCGAGCGAGCGCGCAGAGAGGGAGTG
GCCAACTCCATCACTAGGGGTTCCTGGAGGGGTGGAGTCGTGACGTGAAGTACGTCATAG
GGTTAGGGAGGTCCTGTATTAGAGGTCACGTGAGTGTTTTGCGACATTTTGCGACACCAT
GTGGTTACGCAGGGTATTTAAGCCCGAGTGAGCACGCAGGGTCTCCATTTTGAAGCGGGA
GGTTTGAACGCGCAGCCGCCATGCCGGGGTTTTACGAGATTGTGATTAAGGTCCCCAGCG
ACCTTGACGAGCATCTGCCGGGCATTTCTGACAGCTTTGTGAACTGGGTGGCCGAGAAGG
AATGGGAGTTGCCGCCAGATTCTGACATGGATCTGAATCTGATTGAGCAGGCACCCCTGA
CCGTGGCCGAGAAGCTGCAGCGCGACTTTCTGACGGAGTGGCGCCGCGTGAGTAAGGCCC
CGGAGGCCCTCTTCTTTGTGCAATTTGAGAAGGGAGAGAGCTACTTCCACATGCACGTGC
TTGTGGAGACCACCGGGGTGAAGTCCATGGTTTTGGGACGTTTCCTGAGTCAGATTCGCG
AAAAACTGATTCAGAGAATTTACCGCGGGATCGAGCCGACTTTGCCAAACTGGTTCGCGG
TCACAAAGACCCGAAATGGCGCCGGAGGCGGGAACAAGGTGGTGGATGAGTGCTACATCC
CCAATTACCTGCTCCCCAAAACCCAGCCTGAGCTCCAGTGGGCGTGGACTAATATGGAAC
AGTATTTAAGCGCCTGTTTGAATCTCGCGGAGCGTAAACGGTTGGTGGCGCAGCATCTGA
CGCACGTGTCGCAGACGCAGGAGCAGAACAAAGAGAATCAGAATCCCAATTCTGACGCGC
CGGTGATCAGATCAAAAACCTCAGCCAGGTACATGGAGCTGGTCGGGTGGCTCGTGGATA
AGGGGATTACCTCGGAGAAGCAGTGGATCCAGGAGGACCAGGCCTCATACATCTCCTTCA
ATGCGGCCTCCAACTCGCGGTCCCAGATCAAGGCTGCCTTGGACAATGCGGGAAAAATCA
TGAGCCTGACTAAAACCGCCCCCGACTACCTGGTGGGCCAGCAGCCCGTGGAGGACATTT
CCAGCAATCGGATTTATAAAATCTTGGAACTGAACGGGTACGATCCCCAATACGCGGCTT
CCGTCTTTCTGGGATGGGCCACGAAAAAGTTCGGCAAGAGGAACACCATCTGGCTGTTTG
GGCCTGCAACTACCGGGAAGACCAACATCGCGGAGGCCATAGCCCACACGGTTCCCTTCT
ACGGGTGCGTAAACTGGACCAATGAGAACTTTCCCTTCAATGACTGCGTCGACAAGATGG
TGATCTGGTGGGAGGAGGGAAAAATGACCGCCAAGGTCGTGGAATCGGCCAAAGCCATTC
TCGGCGGAAGCAAGGTGCGCGTGGACCAGAAATGCAAATCCTCGGCCCAGATAGACCCGA
CTCCCGTGATCGTCACCTCCAACACCAACATGTGCGCCGTGATTGACGGAAACTCAACGA
CCTTCGAGCACCAGCAGCCGTTGCAAGACCGGATGTTCAAATTTGAACTCACCCGCCGTC
TGGATCATGACTTTGGGAAGGTCACCAAGCAGGAAGTCAAAGACTTTTTCCGGTGGGCAA
AGGATCACGTGGTTGAGGTGGAGCATGAATTCTACGTCAAAAAGGGTGGAGCTAAGAAAA
GGCCCGCCCCCAGTGACGCAGATATAAGTGAGCCCAAACGGGCGCGCGAGTCAGTTGCGC
AGCCATCGACGTCAGACGCGGAAGCTTCGATCAACTACGCGGACAGGTACCAAAACAAAT
GTTCTCGTCACGTGGGCATGAATTTGATGCTGTTTCCCTGCAGACAATGCGAGAGAATGA
ATCAGAATTCGAATATCTGCTTCACTCACGGACAGAAAGACTGTTTAGAGTGCTTTCCCG
TGTCAGAATCTCAACCCGTTTCTGTCGTCAAAAAGGCGTATCAGAAACTGTGCTACATTC
ATCATATCATGGGAAAGGTGCCAGACGCTTGCACTGCCTGCGATATGGTCAATGTGGATT
TGGATGACTGCATCTCTGAACAATAAATGATTTAAATCAGGTATGGCTGCCGATGGTTAT
CTTCCAGATTGGCTCGAGGACACTCTCTCTGAAGGAATAAGACAGTGGTGGAAGCTCAAA
CCTGGCCCACCACCACCAAAGCCCGCAGAGCGGCACAAGGACGACAGCAGGGGTCTTGTG
CTTCCTGGGTACAAGTACCTCGGACCCTTCAACGGACTCGACAAGGGAGAGCCGGTCAAC
GAGGCAGACGCCGCGGCCCTCGAGCACGACAAGGCCTACGACCGGCAGCTCGACAGCGGA
GACAACCCGTACCTCAAGTACAACCACGCCGACGCGGAGTTTCAGGAGCGTCTTAAAGAA
GATACGTCTTTTGGGGGCAACCTCGGACGAGCAGTCTTCCAGGCGAAAAAGAGGGTTCTT
GAACCTCTGGGCCTGGTTGAGGAACCTGTTAAGACGGCTCCGGGAAAAAAGAGGCCGGTA
GAGCACTCTCCTGCGGAGCCAGATTCCTCCTCCGGAACTGGAAAGTCGGGCCAACAGCCT
GCAAGAAAGAGATTGAATTTTGGTCAGACTGGAGACGCAGACTCCGTACCTGACCCCCAG
CCTCTCGGACAGCCACCAGCAGCCCCCTCTGGTCTGGGAACTAATACGATGGCTACAGGC
AGTGGCGCACCAATGGCAGACAATAACGAGGGCGCCGACGGAGTGGGTAATTCCTCGGGA
AATTGGCATTGCGATTCCACATGGATGGGCGACAGAGTCATCACCACCAGCACCCGCACC
TGGGCTCTGCCCACCTACAACAACCATCTGTACAAGCAGATTTCCAGCCAGTCTGGAGCC
AGCAACGACAACCACTACTTTGGCTACAGCACCCCCTGGGGGTATTTTGACTTCAACAGA
TTCCACTGCCACTTCTCCCCACGTGACTGGCAAAGACTCATCAACAACAACTGGGGATTC
CGGCCCAAGAGACTCAGCTTCAAGCTCTTTAACATTCAAGTCAAGGAGGTCACGCAGAAT
GACGGTACGACGACGATTGCCAATAACCTTACCAGCACGGTTCAGGTGTTTACTGACTCG
GAGTACCAGCTCCCGTACGTCCTCGGCTCGGCGCATCAAGGATGCCTCCCGCCGTTCCCA
GCAGACGTCTTCATGGTGCCACAGTATGGATACCTCACCCTGAACAACGGGAGTCAGGCG
GTAGGACGCTCTTCATTTTACTGCCTGGAGTACTTTCCTTCTCAGATGCTGCGTACTGGA
AACAACTTTACCTTCAGCTACACCTTTGAGGACGTTCCTTTCCACAGCAGCTACGCTCAC
AGCCAGAGTTTGGACCGTCTCATGAATCCTCTCATCGACCAGTACCTGTATTACTTGAGC
AGAACAAACACTCCAAGCGGAACCACCACGATGTCCAGGCTTCAGTTTTCTCAGGCCGGA
GCGAGTGACATTCGGGACCAGTCTAGGAACTGGCTTCCTGGACCCTGTTACCGCCAGCAG
CGAGTATCAAAGACAGCTGCGGACAACAACAACAGTGATTACTCGTGGACTGGAGCTACC
AAGTACCACCTCAATGGCCGGGACTCTCTGGTGAATCCAGGACCAGCCATGGCCAGCCAC
AAAGACGATGAAGAAAAGTATTTTCCTCAGAGCGGGGTTCTCATCTTTGGAAAACAAGAC
TCGGGAAAAACTAATGTGGACATTGAAAAGGTTATGATTACAGACGAAGAGGAAATCAGG
ACCACCAATCCCGTGGCTACGGAGCAGTATGGTTCTGTATCTACCAACCTCCAGAGCGGC
AACACACAAGCAGCTACCTCAGATGTCAACACACAAGGCGTTCTTCCTGGCATGGTCTGG
CAGGACAGAGACGTGTACCTGCAGGGACCCATCTGGGCAAAGATTCCACACACGGACGGA
CACTTTCACCCTTCTCCCCTCATGGGCGGATTTGGACTGAAGCACCCTCCCCCGCAGATT
CTCATCAAGAATACCCCGGTACCTGCGAATCCTTCGACCACCTTCAGTGCGGCAAAGTTT
GCTTCCTTCATCACACAGTACTCCACGGGGCAGGTCAGCGTGGAGATAGAGTGGGAGCTG
CAGAAGGAGAACAGCAAACGCTGGAACCCCGAGATCCAGTATACTTCCAACTACAACAAA
TCTGTTAATGTGGACTTTACTGTGGACACTAATGGTGTGTATTCAGAGCCTCGCCCCATT
GGCACCAGATACCTGACTCGTAATCTGTAATTGCTTGTTAATCAATAAACCGTTAAATTC
GTTTCAGTTGAACTTTGGTCTCTGCGTACTTCTTTCTTATCTAGTTTCCATGGCTACGTA
GATAAGTAGCATGGCGAGTTAATCATTAACTCTAAGGAACCCCTAGTGATGGAGTTGGCC
ACTCCCTCTCTGCGCGCTCGCTCGCTCACTGAGGCCGCCCGGGCAAAGCCCGGGCGTCGG
GCGACCTTTGGTCGCCCGGCCTCAGTGAGCGAGCGAGCGCGCAGAGAGGGAGTGGCCAA
SEQ ID NO: 85
>#3013_AAV.FL.linear [organism = Adeno-associated virus][mol_type = genomic
DNA][isolation_source = liver tissue][topology = linear]
TTGGCCACTCCCTCTCTGCGCGCTCGCTCGCTCACTGAGGCCGGGCGACCAAAGGTCGCC
CGACGCCCGGGCTTTGCCCGGGCGGCCTCAGTGAGCGAGCGAGCGCGCAGAGAGGGAGTG
GCCAACTCCATCACTAGGGGTTCCTGGAGGGGTGGAGTCGTGACGTGAAGTACGTCATAG
GGTTAGGGAGGTCCTGTATTAGAGGTCACGTGAGTGTTTTGCGACATTTTGCGACACCAT
GTGGTCACGCTGGTATTTAAGCCCGAGTGAGCACGCAGGGTCTCCATTTTGAAGCGGGAG
GTTTGAACGCGCAGCCGCCATGCCGGGATTTTACGAGATTGTGATTAAGGTCCCCAGCGA
CCTTGACGAGCATCTGCCCGGCATTTCTGACAGCTTTGTGAACTGGGTGGCCGAGAAGGA
ATGGGAGTTGCCGCCAGATTCTGACATGGATCTGAATCTGATTGAGCAGGCACCCCTGAC
CGTGGCCGAGAAGCTGCAGCGCGACTTTCTGACGGAGTGGCGCCGTGTGAGTAAGGCCCC
GGAGGCTCTTTTCTTTGCGCAATTTGAGAAGGGAGAGAGCTACTTCCACATGCACGTGCT
GGTGGAGACCACCGGGGTGAAATCCATGGTTTTGGGACGTTTCCTGAGTCAGATTCGCGA
AAAACTGATTCAGAGAATTTACCGCGGGATCGAGCCGACTTTGCCAAACTGGTTCGCGGT
CACAAAGACCAGAAATGGCGCCGGAGGCGGGAACAAGGTGGTGGATGAGTGCTACATCCC
CAATTACCTGCTCCCCAAAACCCAGCCTGAGCTCCAGTGGGCGTGGACTAATATGGAACA
GTATTTAAGCGCCTGTTTGAATCTCGCGGAGCGTAAACGGTTGGTGGCGCAGCATCTGAC
GCACGTGTCGCAGACGCAGGAGCAGAATAAAGAGAATCAGAATCCTAATTCTGACGCGCC
GGTGATTAGATCAAAAACCTCAGCCAGGTACATGGAGCTGGTCGGGTGGCTCGTGGATAA
GGGGATCACCTCCGAGAAGCAGTGGATCCAGGAGGACCAGTCTTCATACATCTCCTTCAA
TGCGGCCTCCAACTCGCGGTCCCAGATCAAGGCTGCTCTGGACAATGCGGGGAAGATCAT
GAGCCTGACTAAAACCGCCCCCGACTACCTGGTGGGCCAGCAGCCCGTGGAGGACATTTC
CGAAAATCGGATTTATAAAATCTTGGAACTGAACGGGTACGATCCCCAATACGCGGCTTC
CGTATTCCTGGGATGGGCTACGAAAAAGTTCGGCAAGAGAAACACCATCTGGCTGTTTGG
GCCTGCAACTACCGGGAAGACCAACATCGCGGAGGCCATAGCCCACACGGTTCCCTTCTA
CGGGTGCGTAAACTGGACCAATGAGAACTTTCCCTTCAACGACTGCGTCGACAAGATGGT
GATCTGGTGGGAGGAGGGAAAAATGACCGCCAAGGTCGTGGAGTCGGCCAAAGCCATTCT
CGGCGGAAGCAAGGTGCGCGTGGACCAGAAATGCAAGTCCTCGGCCCAGATAGACCCTAC
TCCTGTGATCGTCACCTCCAACACCAACATGTGCGCCGTGATTGACGGGAACTCAACGAC
CTTCGAGCACCAGCAGCCGTTGCAAGACCGGATGTTCAAATTTGAACTCACCCGCCGTCT
GGATCATGACTTTGGGAAGGTCACCAAGCAGGAAGTCAAAGACTTTTTTCGGTGGGCCCA
AGACCACGTGGTAGAGGTGGAGCATGAATTCTACGTCAAAAAGGGTGGAGCCAAAAAAAG
GCCCGCCCCCAGTGACGCAGATATAAGTGAGCCCAAACGGGCGCGCGAGTCAGTTGCGCA
GCCATCGACGTCAGACGCGGAAGCTTCGATCAACTACGCGGACAGGTACCAAAACAAATG
TTCTCGTCACGTGGGCATGAATCTGATGCTGTTTCCCTGCAGACAATGCGAGAGAATGAA
TCAGAATTCAAATATCTGCTTCACTCACGGACAGAAAGACTGTTTAGACTGCTTTCCCGT
GTCAGAATCTCAACCCGTTTCTGTCGTCAAAAAGTCGTATCAGAAACTTTGCTACATTCA
TCATATCATGGGAAAGGTACCAGACGCTTGCAGTGCTTGCGACCTGGTCAATGTGGATTT
GGATGACTGCATCTCTGAACAATAAATGATTTAAATCAGGTATGGCTGCCGATGGTTATC
TTCCAGATTGGCTCGAGGACACTCTCTCTGAAGGAATAAGACAGTGGTGGAAGCTCAAAC
CTGGCCCACCACCACCAAAGCCCGCAGAGCGGCACAAGGACGACAGTAGGGGTCTTGTGC
TTCCTGGGTACAAGTACCTCGGACCCTTCAACGGACTCGACAAAGGAGAGCCGGTCAACG
AGGCAGACGCCGCGGCCCTCGAACACGACAAGGCCTACGACCGGCAGCTCGACAGCGGAG
ACAACCCGTACCTCAAGTACAACCACGCCGACGCGGAGTTTCAGGAGCGTCTTAAAGAAG
ATACGTCTTTTGGGGGCAACCTCGGACGAGCAGTCTTCCAGGCGAAAAAGAGGGTTCTTG
AACCTCTGGGCCTGGTTGAGGAACCTGTTAAGACGGCTCCGGGAAAAAAGAGGCCGGTAG
AGCATTCTCCTGCGGAGCCAGACTCCTCCTCGGGAACCGGAAAGGCGGGCCAGCAGCCTG
CGAGAAAGAGATTGAATTTCGGTCAGACTGGAGACGCAGACTCCGTACCTGACCCCCAGC
CTCTCGGACAGCCACCAGCAGCCCCCTCTGGTCTGGGAACTAATACGATGGCTACAGGCA
GTGGCGCACCAATGGCAGACAATAACGAGGGCGCCGACGGAGTGGGTAATTCCTCGGGAA
ATTGGCATTGCGATTCCACATGGATGGGCGACAGAGTCATCACCACCAGCACCCGAACCT
GGGCTCTGCCCACCTACAACAACCATCTGTACAAGCAGATTTCCAGCCAATCAGGAGCAT
CGAACGACAACCACTACTTTGGCTACAGCACCCCTTGGGGGTATTTTGACTTCAACAGAT
TCCACTGCCACTTCTCCCCACGTGACTGGCAAAGACTCATCAACAACAACTGGGGATTCC
GACCCAAGAGACTCAACTTCAAGCTCTTTAACATTCAAGTCAAGGAGGTCACGCAGAATG
ACGGTACGACGACGATTGCCAATAACCTTACCAGCACGGTTCAGGTGTTTACTGACTCGG
AGTACCAGCTCCCGTACGTCCTCGGCTCGGCGCATCAAGGATGCCTCCCGCCGTTCCCAG
CAGACGTCTTCATGGTGCCACAGTATGGATACCTCACCCTGAACAACGGGAGTCAGGCGG
TAGGACGCTCTTCATTTTACTGCCTGGAGTACTTTCCTTCTCAGATGCTGCGTACCGGAA
ACAACTTTACCTTCAGCTACACCTTTGAGGACGTTCCTTTCCACAGCAGCTACGCTCACA
GCCAGAGTTTGGACCGTCTCATGAATCCTCTCATCGACCAGTACCTGTATTACTTGAGCA
GAACAAACACTCCAAGCGGAACCACCACGATGTCCAGGCTTCAGTTTTCTCAGGCCGGAG
CGAGTGACATTCGGGACCAGTCTAGGAACTGGCTTCCTGGACCCTGTTACCGCCAGCAGC
GAGTATCAAAGACAGCTGCGGACAACAACAACAGTGATTACTCGTGGACTGGAGCTACCA
AGTACCACCTCAATGGCCGGGACTCGTTGGTTAATCCAGGACCAGCCATGGCCAGCCACA
AAGACGATGAAGAAAAGTATTTTCCTCAGAGCGGGGTTCTCATCTTCGGAAAACAAGACT
CGGGAAAAACTAATGTGGACATTGAAAAGGTCATGATTACAGACGAAGAGGAAATCAGGA
CCACCAATCCCGTGGCTACGGAGCAGTATGGTTCTGTATCTACCAACCTTCAAAGCGGCA
ACACACAAGCAGCTACCTCAGATGTCAACACACAAGGCGTTCTTCCTGGCATGGTCTGGC
AGGACAGAGACGTGTACCTGCAGGGACCCATCTGGGCAAAGATTCCACACACGGACGGAC
ACTTTCACCCTTCTCCCCTCATGGGCGGATTTGGACTGAAGCACCCTCCCCCGCAGATTC
TCATCAAGAATACCCCGGTACCTGCGAATCCTTCTACCACCTTCAGCGCGGCAAAGTTTG
CTTCCTTCATCACACAGTACTCCACGGGGCAGGTCAGCGTGGAGATCGAGTGGGAGCTGC
AGAAGGAGAACAGCAAACGCTGGAACCCCGAGATCCAGTACACTTCCAACTACAACAAAT
CTGTTAATGTGGACTTTACTGTGGACACTAATGGCGTGTATTCAGAGCCTCGCCCCATTG
GCACCAGATACCTGACTCGTAATCTGTAATTGCTTGTTAATCAATAAACCGTTTAATTCG
TTTCAGTTGAACTTCAGTCTCCGCGTACTTCTTTCTTATCTAGTTTCCATGGCTACGTAG
ATAAGTAGCATGGCGGGTTAATCATTAACTTTAAGGAACCCCTAGTGATGGAGTTGGCCA
CTCCCTCTCTGCGCGCTCGCTCGCTCACTGAGGCCGCCCGGCAAAGCCCGGGCGTCGGGC
GACCTTTGGTCGCCCGGCCTCAGTGAGCGAGCGAGCGCGCAGAGAGGGAGTGGCCAA
SEQ ID NO: 86
>#2208_AAV.FL.linear [organism = Adeno-associated virus][mol_type = genomic
DNA][isolation_source = liver tissue][topology = linear]
TTGGCCACTCCCTCTCTGCGCGCTCGCTCGCTCACTGAGGCCGGGCGACCAAAGGTCGCC
CGACGCCCGGGCTTTGCCCGGGCGGCCTCAGTGAGCGAGCGAGCGCGCAGAGAGGGAGTG
GCCAACTCCATCACTAGGGGTTCCTGGAGGGGTGGAGTCGTGACGTGAAGTACGTCATAG
GGTTAGGGAGGTCCTGTATTAGAGGTCACGTGAGTGTTTTGCGACATTTTGCGACACCAT
GTGGTTACGCAGGGTATTTAAGCCCGAGTGAGCACGCAGGGTCTCCATTTTGAAGCGGGA
GGTTTGAACGCGCAGCCGCCATGCCGGGTTTTTACGAGATTGTGATTAAGGTCCCCAGCG
ACCTTGACGAGCATCTGCCCGGCATTTCTGACAGCTTTGTGAACTGGGTGGCCGAGAAGG
AATGGGAGTTGCCGCCAGATTCTGACATGGATCTGAATCTGATTGAGCAGGCACCCCTGA
CCGTGGCCGAGAAGCTGCAGCGCGACTTTCTGACGGAGTGGCGCCGCGTGAGTAAGGCCC
CGGAGGCCCTCTTCTTTGTGCAATTTGAGAAGGGAGAGAGCTACTTCCACATGCACGTGC
TGGTGGAGACCACCGGGGTGAAATCCATGGTTTTGGGACGTTTCCTGAGTCAGATTCGCG
AAAAACTGATTCAGAGAATTTACCGCGGGATCGAGCCGACTTTGCCAAACTGGTTCGCGG
TCACAAAGACCCGAAATGGCGCCGGAGGCGGGAACAAGGTGGTGGATGAGTGCTACATCC
CCAATTACCTGCTCCCCAAAACCCAGCCTGAGCTCCAGTGGGCGTGGACTAATATGGAAC
AGTATTTAAGCGCCTGTTTGAATCTCGCGGAGCGTAAACGGTTGGTGGCGCAGCATCTGA
CGCACGTGTCGCAGACGCAGGAGCAGAACAAGGAGAATCAGAATCCCAATTCTGACGCGC
CGGTGATCAGATCAAAAACCTCAGCCAGGTACATGGAGCTGGTCGGGTGGCTCGTGGATA
AGGGGATTACCTCGGAGAAGCAGTGGATCCAGGAGGACCAGGCTTCATACATCTCCTTCA
ATGCGGCCTCCAACTCGCGGTCCCAAATCAAGGCTGCTCTGGACAATGCGGGAAAGATCA
TGAGCCTGACTAAAACCGCTCCCGACTACCTGGTGGGCCAGCAGCCCGTGGAGGACATTT
CCAGCAATCGGATTTATAAAATCTTGGAACTGAACGGGTACGATCCCCAATACGCGGCTT
CCGTCTTTCTGGGATGGGCCACGAAAAAGTTCGGCAAGAGGAACACCATCTGGCTGTTTG
GGCCTGCAACTACCGGGAAGACCAACATCGCGGAGGCCATAGCCCACACTGTGCCCTTCT
ACGGGTGCGTAAACTGGACCAATGAGAACTTTCCTTTCAATGATTGCGTCGACAAGATGG
TGATCTGGTGGGAGGAGGGGAAGATGACCGCCAAGGTCGTGGAGTCGGCCAAAGCCATTC
TCGGAGGAAGCAAGGTGCGCGTGGACCAGAAATGCAAGTCCTCGGCCCAGATAGACCCGA
CTCCCGTGATTGTCACCTCCAACACCAACATGTGCGCCGTGATTGACGGGAACTCAACGA
CCTTCGAACACCAGCAGCCGTTGCAAGACCGGATGTTCAAATTTGAACTCACCCGCCGTC
TGGATCATGACTTTGGGAAGGTCACCAAGCAGGAAGTCAAAGACTTTTTCCGGTGGGCAA
AGGATCACGTGGTTGAGGTGGAGCATGAATTCTACGTCAAAAAGGGTGGAGCCAAGAAAA
GACCCGCCCCAAGTGACGCAGATATAAGTGAGCCCAAACGGGCGCGCGAGTCAGTTGCGC
AGCCATCGACGTCAGACGCGGAAGCTTCGATCAACTACGCGGACAGGTATCAAAACAAAT
GTTCTCGTCACGTGGGCATGAATCTGATGCTGTTTCCCTGCAGACAATGCGAGAGAATGA
ATCAGAATTCAAATATCTGCTTCACTCACGGACAGAAAGACTGCTTAGAGTGCTTTCCCG
TGTCAGAATCTCAACCCGTTTCTGTCGTCAAAAAGGCGTATCAGAAACTTTGCTACATTC
ATCATATCATGGGAAAGGTGCCAGACGCTTGCACTGCCTGCGATCTGGTCAATGTGGATT
TGGATGACTGCATCTCTGAACAATAAATGATTTAAATCAGGTATGGCTGCCGATGGTTAT
CTTCCAGATTGGCTCGAGGACACTCTCTCTGAAGGAATAAGACAGTGGTGGAAGCTCAAA
CCTGGCCCACCACCACCAAAGCCCGCAGAGCGGCATAAGGACGACAGCAGGGGTCTTGTG
CTTCCTGGGTACAAGTACCTCGGACCCTTCAACGGACTCGACAAGGGAGAGCCGGTCAAC
GAGGCAGACGCCGCGGCCCTCGAGCACGACAAGGCCTACGACCGGCAGCTCGACAGCGGA
GACAACCCGTACCTCAAGTACAACCACGCCGACGCGGAGTTTCAGGAGCGTCTTAAAGAA
GATACGTCTTTTGGGGGCAACCTCGGACGAGCAGTCTTCCAGGCGAAAAAGAGGGTTCTT
GAACCTCTGGGCCTGGTTGAGGAACCTGTTAAGACGGCTCCGGGAAAAAAGAGGCCGGTA
GAGCACTCTCCTGCTGAGCCAGATTCCTCCTCCGGAACTGGAAAGTCGGGCCAACAGCCT
GCAAGAAAAAGATTGAATTTTGGTCAGACTGGAGACGCAGACTCCGTACCAGACCCTCAA
CCTCTCGGAGAACCACCAGCAGCCCCCACAAGTTTGGGATCTACTACAATGGCTTCAGGC
GGTGGCGCACCAGTGGCAGACAATAACGAGGGTGCCGATGGAGTGGGTAATTCCTCAGGA
AATTGGCATTGCGATTCCCAATGGCTGGGCGACAGAGTCATCACCACCAGCACCCGAACC
TGGGCCCTGCCCACCTACAACAACCACCTCTACAAGCAAATCTCCAGCCAATCAGGAGCC
AGCAACGACAACCACTACTTTGGCTACAGCACCCCTTGGGGGTATTTTGACTTCAACAGA
TTCCACTGCCACTTTTCACCACGTGACTGGCAAAGACTCATCAACAACAATTGGGGATTC
CGGCCCAAAAGACTCAACTTCAAGCTGTTTAACATTCAAGTCAAAGAGGTCACGCAGAAT
GACGGTACGACGACGATTGCCAATAACCTTACCAGCACGGTTCAGGTGTTTACTGACTCG
GAGTACCAGCTCCCGTACGTCCTCGGCTCGGCGCATCAAGGATGCCCCCCGCCGTTCCCA
GCAGACGTCTTCATGGTGCCACAGTATGGATACCTCACCCTGAACAACGGGAGTCAGGCG
GTAGGACGCTCTTCCTTTTACTGCCTGGAGTACTTTCCTTCTCAGATGCTTCGTACCGGA
AACAACTTTACCTTCAGCTACACCTTTGAAGACGTTCCTTTCCACAGCAGCTACGCTCAC
AGTCAAAGTCTGGACCGTCTCATGAATCCTCTCATCGACCAGTACCTGTATTACTTGAGC
AGAACAAACACTCCAAGCGGAACCACTACGCAGTCCAGGCTTCAGTTTTCTCAGGCCGGA
GCGAGTGACATTCGGGACCAGTCTAGGAACTGGCTTCCTGGACCCTGTTACCGCCAGCAG
CGAGTATCAAAGACAGCTGCGGATAACAACAACAGTGAATACTCGTGGACTGGAGCTACC
AAGTACCACCTCAATGGCAGAGACTCTCTGGTGAATCCGGGCCCGGCCATGGCCAGCCAC
AAGGACGATGAAGAAAAGTTTTTTCCTCAAAGCGGGGTTCTCATCTTTGGGAAGCAAGGC
TCAGAGAAAACAAATGTGGACATTGAAAAGGTCATGATTACAGACGAAGAGGAAATCAGG
ACCACCAATCCCGTGGCTACGGAGCAGTATGGTTCTGTATCTACCAACCTCCAGAGCGGC
AACACACAAGCAGCTACCTCAGATGTCAACACACAAGGCGTTCTTCCAGGCATGGTCTGG
CAGGACAGAGACGTGTACCTGCAGGGACCCATTTGGGCCAAGATTCCTCACACCGATGGA
CACTTTCATCCTTCTCCGCTGATGGGAGGTTTTGGACTCAAACACCCACCTCCTCAGATC
ATGATCAAAAACACTCCCGTTCCAGCCAATCCTCCCACAAACTTCAGTTCTGCCAAGTTT
GCTTCCTTCATTACACAGTATTCCACGGGGCAGGTCAGCGTGGAGATCGAGTGGGAGCTG
CAGAAGGAGAACAGCAAGCGCTGGAACCCTGAGATCCAGTACACTTCCAACTATAACAAA
TCTGTTAATGTGGACTTTACTGTGGACACTAATGGTGTGTATTCAGAGCCTCGCCCCATT
GGCACCAGATACCTGACTCGTAATCTGTAATTGCTTGTTAATCAATAAACCGTTTAATTC
GTTTCAGTTGAACTTTGGTCTCCGCGTACTTCTTTTCTTATCTAGGTTCCATGGCTACGT
AGATAAGTAGCATGGCGGGTTAATCATTAACTACAAGGAACCCCTAGTGATGGAGTTGGC
CACTCCCTCTCTGCGCGCTCGCTCGCTCGCTGAGGCCGGGCGACCAAAGGTCGCCCGACG
CCCGGGCTTTGCCCGGGCGGCCTCAGTGAGCGAGCGAGCGCGCAGAGAGGGAGTGGCCAA
SEQ ID NO: 87
>#129_AAV.FL.linear [organism = Adeno-associated virus][mol_type = genomic DNA]
[isolation_source = liver tissue][topology = linear]
TTGGCCACTCCCTCTCTGCGCGCTCGCTCGCTCACTGAGGCCGGGCGACCAAAGGTCGCC
CGACGCCCGGGCTTTGCCCGGGCGGCCTCAGTGAGCGAGCGAGCGCGCAGAGAGGGAGTG
GCCAACTCCATCACTAGGGGTTCCTGGAGGGGTGGAGTCGTGACGTGAAGTACGTCATAG
GGTTAGGGAGGTCCTGTATTAGGGGTCACGTGAGTGTTTTGCGACATTTTGCGACACCAT
GTGGTCACGCTGGGTATTTAAGCCCGAGTGAGCACGCAGGGTCTCCATTTTGTAGCGGGA
GGTTTGAACGCGCAGCCGCCATGCCGGGATTTTACGAGATTGTGATTAAGGTCCCCAGCG
ACCTTGACGAGCATCTGCCCGGCATTTCTGACAGCTTTGTGAACTGGGTGGCCGAGAAGG
AATGGGAGTTGCCGCCAGATTCTGACATGGATCTGAATCTGATTGAGCAGGCACCCCTGA
CCGTGGCCGAGAAGCTGCAGCGCGACTTTCTGACGGAGTGGCGCCGCGTGAGTAAGGCCC
CGGAGGCCCTCTTCTTTGTGCAATTTGAGAAGGGAGAGAGCTACTTCCACATGCACGTGC
TGGTGCAACCACCGGGGTTTAAATCCATGGTTTTGGGACGTTTCCTGAGTCAAATTCGCG
AAAAACTGATTCAAAGAATTTACCGCGGGATCGAGCCGACTTTGCCAAACTGGTTCGCGG
TCACAAAGACCCGAAATGGCGCCGGAGGCGGGAACAAGGTGGTGGATGAGTGCTACATCC
CCAATTACCTGCTCCCCAAAACCCAGCCTGAGCTCCAGTGGGCGTGGACTAATATGGAAC
AGTATTTAAGCGCCTGTTTCAATCTCGCGGAGCGTAAACGGTTGGTGGCGCAGCATCTGA
CGCACGTGTCGCAGACGCAGGAGCAGAACAAAGAGAATCAGAATCCCAATTCTGACGCGC
CGGTGATTAGATCAAAAACCTCAGCCAGGTACATGGAGCTGGTCGGGTGGCTCGTGGATA
AGGGGATTACCTCGGAGAAGCAGTGGATCCAGGAGGACCAGGCCTCATACATCTCCTTCA
ATGCGGCCTCCAACTCGCGGTCTCAAATCAAGGCTGCTCTGGACAATGCGGGGAAGATCA
TGAGCCTGACTAAAACGGCCCCCGACTACCTGGTGGGCCAGCAGCCCGTGGAGGACATTT
CCAGCAATCGGATCTATAAAATATTGGAACTGAACGGGTACGACCCCCAATATGCGGCTT
CCGTCTTTCTGGGATGGGCCACGAAAAAGTTCGGCAAGAGGAACACCATCTGGCTGTTTG
GGCCTGCAACTACCGGGAAGACCAACATCGCGGAGGCCATAGCCCACACTGTGCCTTTTT
ACGGGTGCGTAAACTGGACCAATGAGAACTTTCCGTTCAACGATTGCGTCGACAAGATGG
TGATTTGGTGGGAGGAGGGGAAGATGACCGCCAAGGTCGTGGAGTCGGCCAAAGCCATTC
TCGGAGGAAGAAAGGTGCGCGTGGACCAGAAATGCAAGTCCTCGGCCCAGATAGACCCGA
CTCCCGTGATCGTCACCTCCAACACCAACATGTGCGCCGTGATTGACGGGAACTCAACGA
CCTTCGAACACCAGCAGCCGTTGCAAGACCGGATGTTCAAATTTGAACTCACCCGCCGTC
TGGATCATGACTTTGGGAAGGTCACCAAGCAGGAAGTCAAAGACTTTTTCCGGTGGGCAA
AGGATCACGTGGTTGAGGTGGAGCATGAATTCTACGTCAAAAAGGGTGGAGCCAAGAAAA
GACCCGCCCCCAGTGACGCAGATATAAGTGAGCCCAAACGGGCGCGCGAGTCAGTTGCGC
AGCCATCGACGTCAGACGCGGAAGCTTCGATCAACTACGCGGACAGGTACCAAAACAAAT
GTTCTCGTCACGTGGGCATGAATCTGATGCTGTTTCCCTGCAGACAATGCGAGAGAATGA
ATCAGAATTCAAATATCTGCTTCACTCACGGACAGAAAGACTGTTTAGAGTGCTTTCCCG
TGTCAGAATCTCAACCCGTTTCTGTCGTCAAAAAGGCGTATCAGAAACTTTGCTACATTC
ATCATATCATGGGAAAGGTGCCAGACGCTTGCACTGCTTGCGATCTGGTCAATGTGGATT
TGGATGACTGCATCTCTGAACAATAAATGATTTAAATCAGGTATGGCTGCCGATGGTTAT
CTTCCAGATTGGCTCGAGGACACTCTCTCTGAAGGAATAAGACAGTGGTGGAAGCTCAAA
CCTGGCCCACCACCACCAAAGCCCGCAGAGCGGCATCAGGACGACAGCAGGGGTCTTGTG
CTTCCTGGGTACAAGTACCTCGGACCCTTCAACGGACTCGACAAGGGAGAGCCGGTCAAC
GAGGCAGACGCCGCGGCCCTCGAGCACGACAAAGCCTACGACCGGCAGCTCGACAGCGGA
GACAACCCGTACCTCAAGTACAACCACGCCGACGCGGAGTTTCAGGAGCGTCTTAAAGAA
GATACGTCTTTTGGGGGCAACCTCGGACGAGCAGTCTTCCAGGCGAAAAAGAGGGTTCTT
GAACCTCTGGGCCTGGTTGAGGAACCTGTTAAGACGGCTCCGGGAAAAAAGAGGCCGGTA
GAGCACTCTCCTGCGGAGCCAGACTCCTCCTCGGGAACCGGAAAAGCGGGCCAGCAGCCT
GCAAGAAAAAGACTGAATTTCGGTCAGACTGGAGACGCAGACTCCGTACCTGACCCCCAG
CCTCTCGGACAGCCACCAGCAGCCCCCACAAGTTTGGGATCTACTACAATGGCTACAGGC
AGTGGCGCACCAATGGCAGACAATAACGAGGGTGCCGATGGAGTGGGTAATTCCTCAGGA
AATTGGCATTGCGATTCCCAATGGCTGGGCGACAGAGTCATCACCACCAGCACCCGAACC
TGGGCCCTGCCCACCTACAACAACCACCTTTACAAGCAAATCTCCAGCCAATCAGGAGCC
TCAAACGACAACCACTACTTTGGCTACAGCACCCCCTGGGGGTATTTTGACTTCAACAGA
TTCCACTGCCACTTTTCACCACGTGACTGGCAAAGACTCATCAACAACAACTGGGGATTC
CGACCCAAGAGACTCAACTTCAAGCTCTTTAACATTCAAGTCAAAGAGGTCACGCAGAAT
GACGGTACGACGACGATTGCCAATAACCTTACCAGCACGGTTCAGGTGTTTACTGACTCG
GAGTACCAGCTCCCGTACGTCCTCGGCTCGGCGCATCAAGGATGCCTCCCGCCGTTCCCA
GCAGACGTCTTCATGGTGCCACAGTATGGATACCTCACCCTGAACAACGGGAGTCAGGCG
GTAGGACGCTCTTCCTTTTACTGCCTGGAGTACTTTCCTTCTCAGATGCTGCGTACCGGA
AACAACTTTACCTTCAGCTACACTTTTGAGGACGTTCCTTTCCACAGCAGCTACGCTCAC
AGCCAGAGTCTGGATCGTCTGATGAATCCTCTCATCGACCAGTACCTGTATTATCTAAAC
AGAACACAAACARCCAGTGGAACTCCCACGCAGTCTCGGCTACTGTTTAGCCAAGCTGGA
CCCACAAGCATGTCTCTTCAAGCTAAAAACTGGCTGCCTGGACCGTGTTATCGCCAGCAG
CGTTTGTCAAAGCAGGCAAACGACAACAACAACAGCAACTTTCCCTGGACTGGAGCTACC
AAGTACCACCTCAATGGCAGAGACTCTTTGGTGAACCCGGGCCCGGCCATGGCCAGCCAC
AAGGACGATGAAGAAAAGTTTTTCCCCATGCATGGAACCCTAATCTTTGGGAAGCAAGGC
TCAGAGAAAACCAACGCGGAATTGGAAAATGTCATGATTACAGATGAAGAGGAAATCAGG
ACCACCAATCCCGTGGCTACAGAGCAGTATGGTTCTGTATCTACCAACCTCCAGAGAGGC
AACAGACAAGCAGCTACCGCAGATGTCAACACACAAGGCGTTCTTCCAGGCATGGTCTGG
CAGGACAGAGATGTGTACCTTCAGGGGCCCATCTGGGCAAAGATTCCACACACGGACGGA
CATTTTCACCCCTCTCCCCTCATGGGTGGATTCGGACTTAAACACCCTCCTCCACAGATT
CTCATCAAGAACACCCCGGTACCTGCGAATCCTTCGACCACCTTCAGTGCGGCAAAGTTT
GCTTCCTTCATCACACAGTATTCCACGGGACAGGTCAGCGTGGAGATCGAGTGGGAGCTG
CAGAAGGAGAACAGCAAACGCTGGAACCCCGAGATCCAGTACACTTCCAACTACAACAAA
TCTGTTAATGTGGACTTTACTGTGGACACTAATGGTGTGTATTCAGAGGCTCGCCCCATT
GGCACCAGATACCTGACTCGTAATCTGTAATTGCTTGTTAATCAATAAACCGTTTAATTC
GTTTCAGTTGAACTTTGGTCTCCGCGTACTTCTTTCTTATCTAGTTTCCATGGCTACGTA
GATAAGTAGCATGGCGGGTTAATCATTAAATCTAAGGAACCCCTAGTGATGGAGTTGGCC
ACTCCCTCTCTGCGCGCTCGCTCGCTCACTGAGGCCGGGCGACCAAAGGTCGCCCGACGC
CCGGGCTTTGCCCGGGCGGCCTCAGTGAGCGAGCGAGCGCGCAGAGAGGGAGTGGCCAA
SEQ ID NO: 88
>#2731_AAV.FL.linear [organism = Adeno-associated virus][mol_type = genomic
DNA][isolation_source = liver tissue][topology = linear]
TTGGCCACTCCCTCTCTGCGCGCTCGCTCGCTCACTGAGGCCGGGCGACCAAAGGTCGCC
CGACGCCCGGGCTTTGCCCGGGCGGCCTCAGTGAGCGAGCGAGCGCGCAGAGAGGGAGTG
GCCAACTCCATCACTAGGGGTTCCTGGAGGGGTGGAGTCGTGACGTGAATTACGTCATAG
GGTTAGGGAGGTCCTGTATTAGAGGTCACGTGAGTGTTTTGCGACATTTTGCGACACCAT
GTGGTCACGCTGGGTATTTAAGCCCGAGTGAGCACGCAGGGTCTCCATTTTGAAGCGGGA
GGTTTGAACGCGCAGCCGCCATGCCGGGATTTTACGAGATTGTGATTAAGGTCCCCAGCG
ACCTTGACGAGCATCTGCCCGGCATTTCTGACAGCTTTGTGAACTGGGTGGCCGAGAAGG
AATGGGAGTTGCCGCCAGATTCTGACATGGATCTGAATCTGATTGAGCAGGCACCCCTGA
CCGTGGCCGAAAAGCTGCAGCGTGACTTTCTGACGGAATGGCGCCGTGTGAGTAAGGCCC
CGGAGGCCCTTTTCTTTGTGCAATTTGAGAAGGGAGAGAGCTACTTCCACATGCACGTGC
TCGTGGAAACCACCGGGGTGAAATCCATGGTTTTGGGACGTTTCCTGAGTCAGATTCGCG
AAAAACTGATTCAGAGAATTTACCGCGGGATCGAGCCGACTTTGCCAAACTGGTTCGCGG
TCACAAAGACCCGAAATGGCGCCGGAGGCGGGAACAAGGTGGTGGATGAGTGCTACATCC
CCAATTACTTGCTCCCCAAAACCCAGCCTGAGCTCCAGTGGGCGTGGACTAATATGGAAC
AGTATTTAAGCGCCTGTTTGAATCTCACGGAGCGTAAACGGTTGGTGGCGCAGCATCTGA
CGCACGTGTCGCAGACGCAGGAGCAGAACAAAGAGAATCAGAATCCCAATTCTGATGCGC
CGGTGATCAGATCAAAAACTTCAGCCAGGTACATGGAGCTGGTCGGGTGGCTCGTGGACA
AGGGGATTACCTCGGAGAAGCAGTGGATCCAGGAGGACCAGGCCTCATACATCTCCTTCA
ATGCGTCCTCCAACTCGCGGTCCCAAATCAAGGCTGCCTTGGACAATGCGGGAAAGATCA
TGAGCCTGACTAAAACCGCCCCCGACTACCTGGTGGGCCAGCAGCCCGTGGAGGACATTT
CCAGCAATCGGATTTATAAAATCTTGGAACTGAACGGGTACGATCCCCAATATGCGGCTT
CCGTCTTTCTGGGATGGGCCACGAAAAAGTTCGGCAAGAGGAACACCATCTGGCTGTTTG
GGCCTGCAACTACCGGGAAGACCAGGAGGATGTCCTCCAGCTTGGGCAACGTGCCCTTCT
ACGGGTGCGTAAACTGGACCAATGAGAACTTTCCCTTCAACGACTGCGTCGACAAGATGG
TGATCTGGTGGGAGGAGGGAAAGATGACTGCCAAGGTCGTGGAGTCTGCCAAAGCCATTC
TCGGAGGAAGCAAGGTGCGCGTGGACCAGAAATGCAAGTCCTCGGCCCAGATAGACCCGA
CTCCCGTGATCGTCACCTCCAACACCAACATGTGCGCCGTGATTGACGGGAACTCAACGA
CCTTCGAACACCAGCAGCCGTTGCAAGACCGGATGTTCAAATTTGAACTCACTAGCCGTC
TGGATCATGACTTTGGGAAGGTCACCAAGCAGGAAGTCAAAGACTTTTTCCGGTGGGCAA
AGGATCACGTGGTTGAGGTGGAGCATGAATTCTACGTCAAAAAGGGTGGAGCCAAAAAAA
GACCCGCCCCCAGTGACGCAGATATAAGTGAGCCCAAACGGGTGCGCGAGTCAGTTGCGC
AGCCATCGACGTCAGACGCGGAAGCTTCGATCAACTACGCGGACAGGTACCAAAACAAAT
GTTCTCGTCACGTGGGCATGAATCTGATGCTGTTTCCCTGCAGACAATGCGAGAGAATGA
ATCAGAATTCAAATATCTGCTTCACTCACGGACAGAAAGACTGTTTAGAGTGCTTTCCCG
TGTCAGAATCTCAACCCGTTTCTGTCGTCAAAAAGGCGTATCAGAAACTGTGCTACATTC
ATCATATTATGGGAAAGGTGCCAGACGCTTGCACTGCCTGCGATCTGGTCAATGTGGATT
TGGATGACTGCATCTCTGAACAATAAATGATTTAAATCAGGTATGGCTGCCGATGGTTAT
CTTCCAGATTGGCTCGAGGACACTCTCTCTGAAGGAATAAGACAGTGGTGGAAGCTCAAA
CCTGGCCCACCACCACCAAAGCCCGCAGAGCGGCATAAGGACGACAGCAGGGGTCTTGTG
CTTCCTGGGTACAAGTACCTCGGACCCTTCAACGGACTCGACAAGGGAGAGCCGGTCAAC
GAGGCAGACGCCGCGGCCCTCGAGCACGACAAGGCCTACGACCGGCAGCTCGACAGCGGA
GACAACCCGTACCTCAAGTACAACCACGCCGACGCGGAGTTTCAGGAGCGCCTTAAAGAA
GATACGTCTTTTGGGGGCAACCTCGGACGAGCAGTCTTCCAGGCGAAAAAGAGGGTTCTT
GAACCTCTGGGCCTGGTTGAGGAACGTGTTAAGACGGCTCCGGGAAAAAAGAGGCCGGTA
GCAGTGGCGCACCAGTGGCAGACAATAACGAGGGTGCCGATGGAGTGGGTAATTCCTCAG
GAAAAAAGATTGAATTTTGGTCAGACTGGAGACGCAGATTGGCATTGCGACCCCCAGCCT
CTCGGACAGCCACCAGCAGCCCCCTCTGGTTTGGGATCTACTACAATGGCTACAGGCAGT
GGCGCACTATTATTATTGGAAAGCTTGAGTGCCGATGGAGTGGGTAATTCCTCAGGAAAT
TGGCATTGCGATTCCCAATGGCTGGGCGACAGAGTCATCACCACCAGCACCCGAACCTGG
GCCCTGCCCACCTACAACAACCACCTCTACAAGCAAATCTCCAGCCAATCAGGAGCCTCA
AACGACAACCACTACTTTGGCTACAGCACCCCTTGGGGGTATTTTGACTTCAACAGATTC
CACTGCCACTTTTCACCACGTGACTGGCAAAGACTCATCAACAACAACTGGGGATTCCGA
CCCAAGAGACTCAACTTCAAGCTCTTTAACATTCAAGTCAAAGAGGTCACGCAGAATGAC
GGTACGACGACGATTGCCAATAACCTTACCAGCACGGTTCAGGTGTTTACTGACTCGGAG
TACCAGCTCCCGTACGTCCTCGGCTCGGCGCATCAAGGATGCCTCCCGCCGTTTCCAGCG
GACGTCTTCATGGTGCCACAGTATGGATACCTCACCCTGAACAACGGGAGTCAGGCAGTA
GGACGCTCTTCATTTTACTGCCTGGAGTACTTTCCTTCTCAGATGCTGCGTACTGGAAAC
AACTTTCAGTTCAGCTACACCTTTGAAGACGTTCCTTTCCACAGCAGCTACGCTCACAGC
CAGAGTCTGGATCGGCTGATGAATCCTCTGATCGACCAGTACCTGTATTATCTGAACAAA
ACACAATCAAATAGTGGAACCACCACGATGTCAAGGCTACTGTTTAGTCAAGCTGGACCC
ACCAGCATGTCTCTTCACGCTAAAAACTGGCTGCCTGGACCTTGCTACAGACAGCAGCGT
CTGTCAAAGCAGGCAAACGACAACAACAACAGCAACTTTCCCTGGACTGCAGCTACAAAG
TATCATCTAAATGGCAGTGACTCGTTGATTAATCCAGGACCAGCTATGGCCAGCCACAAA
GACGATGAAGAAAAGTTTTTTCCTCAGAGCGGGGTTCTCATCTTTGGGAAGCAAGGCTCA
GAGAAAACAAATGTGGACATTGAAAAGGTCATGATTACAGACGAAGAGGAAATCAGGACA
ACCAATCCCGTGGCTACGGAGCAGTATGGATCTGTATCTACCAACCTCCAGAGAGGCAAC
AGACGAGCAGCTACCGCAGATGTCAACACACAAGGCGTTCTTCCAGGCATGGTCTGGCAG
GACAGAGATGTGTACCTTCAGGGGCCCATCTGGGCAAAGATTCCACACACGGACGGACAT
TTTCACCCCTCTCCCCTCATGGGTGGATTCGGACTTAAACACCCTCCTCCACAGATTCTC
ATCAAGAACACCCCGGTACCTGCGAATCCTTCGACCACCTTCAGTGCGGCAAAGTTTGCT
TCCTTCATCACACAGTACTCCACGGGACAGGTCAGCGTGGAGATCGAGTGGGAGCTGCAG
AAGGAAAACAGCAAACGCTGGAATCCCGAAATTCAGTACACTTCCAACTACAACAAGTCT
GTTAATGTGGACTTTACTGTGGACACTAATGGCGTGTATTCAGAGCCTCGCCCCATTGGC
ACCAGATACCTGACTCGTAATCTGTAATTGCTTGTTAATCAATAAACCGTTTAATTCGTT
TCAGTTGAACTTTGGTCTCTGCGTGCTTCTTTCTTATCTAGTTTCCATGGCTACGTAGAT
AAGTAGCATGGCGGGTTAATCATTAACTATAAGGAACCCCTAGTGATGGAGTTGGCCACT
CCCTCTCTGCGCGCTCGCTCGCTCACTGAGGCCGGGCGACCAAAGGTCGCCCGACGCCCG
GGCTTTGCCCGGGCGGCCTCAGTGAGCGAGCGAGCGCGCAGAGAGGGAGTGGCCAA
SEQ ID NO: 89
>#1602_AAV.FL.linear [organism = Adeno-associated virus][mol_type = genomic
DNA][isolation_source = liver tissue][topology = linear]
TTGGCCACTCCCTCTCTGCGCGCTCGCTCGCTCACTGAGGCCGGGCGACCAAAGGTCGCC
CGACGCCCGGGCTTTGCCCGGGCGGCCTCAGTGAGCGAGCGAGCGCGCAGAGAGGGAGTG
GCCAACTCCATCACTAGGGGTTCCTGGAGGGGTGGAGTCGTGACGTGAAGTACGTCATAG
GGTTAGGGAGGTCCTGTATTAGAGGTCACGTGAGTGTTTTGCGACATTTTGCGACACCAT
GTGGTTACGCAGGGTATTTAAGCCCGAGTGAGCACGCAGGGTCTCCATTTTGAAGCGGGA
GGTTTGAACGCGCAGCCGCCATGCCTGGATTTTACGAGATTGTGATTAAGGTCCCCAGCG
ACCTTGACGAGCATCTGCCCGGCATTTCTGACAGCTTTGTGAACTGGGTGGCCGAGAAGG
AATGGGAGTTGCCGCCAGATTCTGACATGGATCTGAATCTGATTGAGCAGGCACCCCTGA
CCGTGGCCGAGAAGCTGCAGCGCGACTTTCTGACAGAATGGCGCCGTGTGAGTAAAGCCC
CCGAGGCCCAGATCACAAAGTCAGGAGAGAAGGGAGAGAGCTACTTCCACATGCACGTGC
TGGTGGAAACCACCGGGGTGAAATCCATGGTTTTGGGACGTTTCCTGAGTCAGATTCGCG
AAAAACTGATTCAGAGAATTTACCGCGGGATCGAACCGACTTTGCCATACTGGTTCGCGG
TCACAAAGACCCGAAATGGCGCCGGAGGCGGGAACAAGGTGGTGGATGAGTGCTACATCC
CCAATTACCTGCTCCCCAAAACCCAACCTGAGCTCCAGTGGGCGTGGACTAATATGGAAC
AGTATTTAAGCGCCTGTTTGAATCTCGCGGAGCGTAAACGGTTGGTGGCGCAGCATCTGA
CGCACGTGTCGCAGACGCAGGAGCAGAACAAAGAGAATCAGAATCCCAATTCTGACGCGC
CGGTGATCAGATCAAAAACCTCAGCCAGGTACATGGAGCTGGTCGGGTGGCTCGTGGATA
AGGGGATTACCTCGGAGAAGCAGTGGATCCAGGAGGACCAGGCCTCATACATCTCTTTCA
ATGCGGCCTCCAACTCGCGGTCCCATATCAAGGCTGCTTTGGACAATTCTGGAAAGATCA
TGAGCCTTACTAAAATGGCATTTGACCCAGCCTATATCCAGCAGCCCGTGGAGGACATTT
CCAGCAACCGGATCTATAAAATCTTGGAACTGAACGGGTACGATCCCCAATACGCGGCTT
CCGTCTTTCTGGGATGGGCCACGAAAAAGTTCGGCAAGAGGAACACCATCTGGCTGTTTG
GGCCTGCAACTACCGGGAAGACCAACATCGCGGAGGCCATAGCTCACACTGTGCCCTTCT
ACGGGTGCGTAAACTGGACCAATGAGAACTTTCCTTTCAATGATTGCGTCGACAAAATGG
TGATCTGGTGGGAGGAGGGAAAGATGACCGCCAAGGTCGTGGAGTCGGCCAAAGCCATTC
TCGGCGGAAGCAAGGTGCGCGTGGACCAGAAATGCAAGTCCTCGGCCCAGATAGACCCGA
CTCCCGTGATCGTCACCTCCAACACCAACATGTGCGCCGTGATTGACGGGAACTCAACGA
CCTTCGAACACCAGCAGCCGTTGCAAGACCGGATGTTCAAATTTGAACTCACCCGCCGTC
TGGATCATGACTTTGGGAAGGTCACCAAGCAGGAAGTCAAAGACTTTTTCCGGTGGGCAA
AGGATCACGTGGTTGAGGTGGAGCATGAATTCTACGTCAAAAAGGGTGGAGCCAAGAAAA
GACCCGCCCCCAGTGACGCAGATATAAGTGAGCCCAAACGGGCGCGCGAGTCAGTTGCGC
AGCCATCGACGTCAGACGCGGAAGCTTCAATCAACTACGCGGACAGGTACCAAAACAAAT
GTTCTCGTCACGTGGGCATGAATCTGATGCTGTTTCCCTGCAGACAATGCGAGAGAATGA
ATCAGAATTCAAATATCTGCTTCACTCACGGACAGAAAGACTGTTTAGAGTGCTTTCCCG
TGTCAGAATCTCAACCCGTTTCTGTCGTCAAAAAGGCGTATCAGAAACTGTGCTACATTC
ATCATATCATGGGAAAGGTGCCAGACGCTTGCACTGCCTGCGATCTGGTCAATGTGGATT
TGGATGACTGCATCTCTGAACAATAAATGATTTAAATCAGGTATGGCTGCCGATGGTTAT
CTTCCAGATTGGCTCGAGGACACTCTCTCTGAAGGAATAAGACAGTGGTGGAAGCTCAAA
CCTGGCCCACCACCACCAAAGTCCGCAGAGCGGCATAAGGACGACAGCAGGGGTCTTGTG
CTTCCTGGGTACAAGTACCTCGGACCCTTCAASGGACTCGACAAAGGAGAGCCGGTCAAC
GAGGCAGACGCCGCGGCCCTCGAGCACGACAAGGCCTACGACCGGCAGCTCGACAGCGGA
GACAACCCGTACCTCAAGTACAACCACGCCGACGCGGAGTTTCAGGAGCGCCTTAAAGAA
GATACGTCTTTTGGGGGCAACCTCGGACGAGCAGTCTTCCAGGCGAAAAAGAGGGTTCTT
GAMCCTCTGGGCCYGGTTGAGGAACCTGTTAAGACGGCTCCGGGAAAAAAGAGGCCGGTA
GAGCACTCTCCTGTGGAGCCAGACTCCTCCTCGGGAACCGGAAAAGCGGGCCAGCAGCCT
GCAAGAAAAAGACTGAATTTCGGTCAGACTGGAGACTCAGACTCAAGCTCCAGGGATATG
AGAAAAGTATTTTCTGCAGCAGCCCCCACAAGTTTGGGATCTACTACAATGGCTTCAGGC
GGTGGCGCACCAGTGGCAGACAATAACGAGGGTGCCGATGGAGTGGGTAATTCCTCAGGA
AATTGGCATTGCGATTCCCAATGGCTGGGCGACAGAGTCATCACCACCAGCACCCGAACC
TGGGCCCTGCCCACCTACAACAACCACCTCTACAAGCAAATCTCCAGCCAATCAGGAGCC
AGCAACGACAACCACTACTTTGGCTACAGCACCCCTTGGGGGTATTTTGACTTCAACAGA
TTCCACTGCCACTTTTCACCACGTGACTGGCAAAGACTCATCAACAACAATTGGGGATTC
CGGCCCAAGAGACTCAACTTCAAGCTCTTTAACATTCAAGTCAAAGAGGTCACGCAGAAT
GACGGTACGACGACGATTGCCAATAACCTTACCAGCACGGTTCAGGTGTTTACTGACTCG
GAGTACCAGCTCCCGTACGTCCTCGGCTCGGCGCATCAAGGATGCCTCCCGCCGTTCCCA
GCGGACGTCTTCATGGTCCCACAGTATGGATACCTCACCCTGAACAACGGGAGTCAGGCG
GTAGGACGCTCTTCCTTTTACTGCCTGGAGTACTTTCCTTCTCAGATGCTGCGTACTGGA
AACAACTTTCAGTTTAGCTACACTTTTGAAGACGTTCCTTTCCACAGCAGCTACGCTCAC
AGCCAGAGTCTGGATCGGCTGATGAATCCTCTGATCGACCAGTACCTGTATTATCTGAAC
AAGACACAAACAAATAGTGGAACTCTTCAGCAGTCTCGGCTACTGTTTAGCCAAGCTGGA
CCAACCAACATGTCTCTTCAAGCTAAAAACTGGCTGCCTGGACCTTGCTACAGACAGCAG
CGTCTGTCAAAGCAGGCAAACGACAACAACAACAGCAACTTTCCCTGGACTGCAGCTACA
AAGTATCACCTCAATGGCAGAGACTCTCTGGTGAATCCGGGCCCGGCCATGGCAAGCCAC
AAGGACGATGAAGAAAAGTTTTTTCCTCAGAGCGGGGTTCTCATCTTTGGGAAGCAAGGC
TCAGAGAAAACAAATGTGGACATTGAAAAGGTCATGATTACAGACGAAGAGGAAATCAGG
ACAACCAATCCCGTGGCTACGGAGCAGTATGGTTCTGTATCTACCAACCTCCAGAGAGGC
AACAGACAAGCAGCTACCGCAGATGTCAACACACAAGGCGTTCTTCCAGGCATGGTCTGG
CAGGACAGAGATGTGTACCTTCAGGGGCCCATCTGGGCAAAGATTCCACACACGGACGGA
CATTTTCACCCCTCTCCCCTCATGGGTGGATTCGGACTTAAACACCCTCCTCCACAGATT
CTCATCAAGAACACCCCGGTACCTGCGAATCCTTCGACCACCTTCAGTGCTGCCAAGTTT
GCTTCTTTCATCACACAGTATTCCACGGGGCAGGTCAGCGTGGAGATCGAGTGGGAGCTG
CAGAAGGAGAAMAGCAAACGCTGGAATCCCGAGATTCAGTACACTTCCAACTACAACAAA
TCTGTTAATGTGGACTTTACTGTGGACACTAATGGTGTGTATTCAGAGCCTCGCCCCATT
GGCACCAGATACCTGACTCGTAATCTGTAATTGCTTGTTAATCAATAAACCGTGTAATTC
GTTTCAGTTGAACTTTGGTCTCCGCGTACTTCTTTTCTTATCTAGTTTCCATGGCTACGT
AGATAAGTAGCATGGCGGGTTAATCATTAACCACAAGGAACCCCTAGTGATGGAGTTGGC
CACTCCCTCTCTGCGCGCTCGCTCGCTCACTGAGGCCGGGCGACCAAAGGTCGCCCGACG
CCCGGGCTTTGCCCGGGCGGCCTCAGTGAGCGAGCGAGCGCGCAGAGAGGGAGTGGCCAA
SEQ ID NO: 90
>#1010_AAV.FL.linear [organism = Adeno-associated virus][mol_type = genomic
DNA][isolation_source = liver tissue][topology = linear]
TTGGCCACTCCCTCTCTGCGCGCTCGCTCGCTCACTGAGGCCGGGCGACCAAAGGTCGCC
CGACGCCCGGGCTTTGCCCGGGCGGCCTCAGTGAGCGAGCGAGCGCGCAGAGAGGGAGTG
GCCAACTCCATCACTAGGGGTTCCTGGAGGGGYGGAGTCGTGACGTGAAGTACGTCATAG
GGTTAGGGAGGTCCTGTATTAGAGGTCACGTGAGTGTTTTGCGACATTTTGCGACACCAT
GTGGTCACGCTGAGTATTTAAGCCCGAGTGAGCACGCAGGGTCTCCATTTTGAAGCGGGA
GGTTTGAACGCGCAGCCGCCATGCCGGGATTTTACGAGATTGTGATTAAGGTCCCCAGCG
ACCTTGACGAGCATCTGCCCGGCATTTCTGACAGCTTTGTGAACTGGGTGGCCGAGAAGG
AATGGGAGTTGCCGCCAGATTCTGACATGGATCTGAATCTGATTGAGCAGGCACCCCTGA
CCGTGGCCGAGAAGCTGCAGCGCGACTTTCTGACAGAGTGGCGCCGCGTGAGTAAGGCCC
CGGAGGCCCTTTTCTTTGTGCAATTTGAGAAGGGAGAGAGCTACTTCCACATGCACGTGC
TCGTGGAAACCACCGGGGTGAAATCCATGGTTTTAGGACGTTTCCTGAGTCAGATTCGCG
AAAAACTGATTCAGAGAATTTACCGCGGGATCGAGCCGACTTTGCCAAACTGGTTCGCGG
TTACAAAGACCCGAAATGGCGCCGGAGGCGGGAACAAGGTGGTGGATGAGTGCTACATCC
CCAATTACCTGCTCCCCAAAACCCAGCCTGAGCTCCAGTGGGCGTGGACTAATATGGAAC
AGTATTTAAGCGCCTGTTTGAATCTCGCTGAGCGTAAACGGTTGGTGGCGCAGCATCTGA
CGCACGTGTCGCAGACGCAGGAGCAGAACAAAGAGAATCAGAATCCCAATTCTGACGCGC
CGGTGATTAGATCAAAAACCTCAGCCAGGTACATGGAGCTGGTCGGGTGGCTCGTGGATA
AGGGGATTACCTCGGAGAAGCAGTGGATCCAGGAGGACCAGGCCTCATACATCTCCTTCA
ATGCGGCCTCCAACTCGCGGTCCCAAATCAAGGCTGCCTTGGACAATGCGGGAAAGATCA
TGAGCCTGACTAAAACCGCCCCCGACTACCTGGTGGGCCAGCAGCCCGTGGAGGACATTT
CCAGCAATCGGATTTATAAAATTTTGGAACTAAACGGGTACGATCCCCAATATGCGGCTT
CCGTCTTTCTGGGATGGGCCACGAAAAAGTTTGGCAAGAGGAACACCATCTGGCTGTTTG
GGCCTGCAACTACCGGGAAGACCAACATCGCGGAGGCCATAGCCCACACTGTGCCCTTCT
ACGGGTGCGTAAACTGGACCAATGAGAACTTTCCCTTCAACGACTGTGTCGACAAGATGG
TGATCTGGTGGGAGGAGGGAAAGATGACCGCCAAGGTTGTGGAGTCGGCCAAAGCTATTC
TCGGAGGAAGCAAGGTGCGCGTGGACCAGAAATGCAAGTCCTCGGCCCAGATAGACCCGA
CTCCCGTGATCGTCACCTCCAACACCAACATGTGCGCCGTGATTGACGGGAACTCAACGA
CCTTCGAACACCAGCAGCCGTTGCAAGACCGGATGTTCAAATTTGAACTCACCCGCCGTC
TGGATCATGACTTTGGGAAGGTCACCAAGCAGGAAGTCAAAGACTTTTTCCGGTGGGCAA
AGGATCACGTGGTTGAGGTGGAGCATGAATTCTACGTCAAAAAGGGTGGAGCCAAGAAAA
GACCCGCCCCCAGTGACGCAGATATAAGTGAGCCCAAACGGGTGCGCGAGTCAGTTGCGC
AGCCATCGACGTCAGACGCGGAAGCTTCAATCAACTACGCGGACAGGTACCAAAACAAAT
GTTCTCGTCACGTGGGCATGAATCTGATGCTGTTTCCCTGCAGACAATGCGAGAGAATGA
AYCAGAATTCAAATATTTGCTTCACTCACGGACAGAAAGACTGTTTAGAGTGCTTTCCCG
TGTCAGAATCTCAACCCGTTTCTGTCGTCAAAAAGGCGTATCAGAAACTTTGCTACATTC
ATCATATCATGGGAAAGGTGCCAGACGCTTGCACTGCCTGCGATCTGGTCAATGTGGATT
TGGATGACTGCATCTTTGAACAATAAATGATTTAAATCAGGTATGGCTGCCGATGGTTAT
CTTCCAGATTGGCTCGGGGAGACCCTCTCTCAAGGAATAAGACAGTGGTGGAAGCTCAAA
CCTGGCCCACCACCACCAAAGCCCGCAGAGCGGCATAAGGRCGACAGCAGGGGTCTTGTG
CTTCCTGGGTACAAGTACCTCGGACCCTTCAACGGACTCGACAAGGGAGAACCGGTCAAC
GAGGCAGACGCCGCGGCCCTCGAACACGACAAGGCCTACGACCGGCAGCTCGACAGCGGA
CACATCCCGTACCTCAAGTACAACCACGCCGACGCGGAGTTTCAGGAGCGCCTTAAAGAA
GATACGTCTTTTGGGGGCAACCTCGGACGAGCAGTCTTCCAGGCGAAAAAGAGGGTTCTT
GAACCTCTGGGCCTGGTTGAGGAACCTGTTAAGACGGCTCCGGGAAAAAAGAGGCCGGTA
GAGCACTCTCCTGTGGAGCCAGACTCCTCCTCGGGAACCGGAAAAGCGGGCCAGCAGCCT
GCAAGAAAAAGATTGAATTTCGGCCAGACTGGAGACGCAGACTCCGTACCTGACCCCCAG
CCTCTCGGACAGCCACCAGCAGCCCCCTCTGGTCTGGGAACTACTACGATGGCTACAGGC
AGTGGCGCACCAGTGGCAGACAATAACGAGGGTGCCGATGGAGTGGGTAATTCCTCAGGA
AATTGGCATTGCGATTCCCAATGGCTGGGCGACAGAGTCATCACCACCAGCACCCGAACC
TGGGCCCTGCCCACCTACAACAACCACCTCTACAACTTTTTTCAAATTAAAATAAATGCC
TCGAACGACAATCACTACTTTGGCTACAGCACCCCTTGGGGGTATTTTGACTTCAACAGA
TTCCACTGCCACTTTTCACCACGTGACTGGCAAAGACTCATCAACAACAACTGGGGATTC
CGACCCAAGAGACTCAACTTCAAGCTCTTTCTCATTCAAGTCAAAGAGGTCACGCAGAAT
GACGGTACGACGACGATTGCCAATAACCTTACCAGCACGGTTCAGGTGTTTACTGMCTCG
GAGTACCAGCTCCCGTACGTCCTCGGCTCGGCSCAYCAAGGRTGCCYCCCGCCGTTCCCA
GCGGACGTCTTCATGGTCCCACAGTATGGATACCTCACCCTGAACAACGGGAGTCAGGCG
GKAGGACGCTCTTCATTTTACTGCCTGGAGTACTTTCCTTCTCAGATGCTGCGTACTGGA
AACAACTTTCAGTTCAGCTACACCTTTGAAGACGTTCCTTTCCACAGCAGCTACGCTCAC
AGCCAGAGTCTGGATCGGCTGATGAATCCTCTGATCGACCAGTACCTGTATTATCTGAAC
AAAACACAATCAAATAGTGGAACTCTTCAGCAGTCTCGGCTACTGTTTAGTCAAGCTGGA
CCCACCAGCATGTCTCTTCAAGCTAAAAACTGGCTGCCTGGACCCTGTTACCGCCAGCAG
CGAGTATCAAAGACATCTGCGGATAACAACAACAGTGAATACTCGTGGACTGGAGCTACC
AAGTACCACCTCAATGGCAGAGACTCTCTGGTGAATCCGGGCCCGGCCATGGCAAGCCAC
AAGGACGATGAAGAAAAGTTTTTTCCTCAGAGCGGGGTTCTCATCTTTGGGAAGCAAGGC
TCAGAGAAAACAAATGTGGACATTGAAAAGGTCATGATTACAGACGAAGAAGAAATCCGC
ACCACCAATCCCGTGGCTACGGAGCAGTACGGATATGTGTCAAATAATTTGCAAAACTCA
AATAGACAAGCAGCTACCGCAGATGTCAACACACAAGGCGTTCTTCCAGGCATGGTCTGG
CAGGACAGAGATGTGTACCTTCAGGGGCCCATCTGGGCAAAGATTCCACACACGGACGGA
CATTTTCACCCCTCTCCCCTCATGGGTGGATTCGGACTTAAACACCCTCCTCCACAGATT
CTCATCAAGAACACCCCGGTTCCAGCCAATCCTCCTACAAACTTCAGTTCTGCCAAGTTT
GCTTCTTTCATCACACAGTACTCCACGGGGCAGGTCAGCGTGGAGATCGAGTGGGAGCTG
CAGAAGGAAAACAGCAAACGCTGGAATCCCGAGATTCAGTACACTTCCAACTACAACAAA
TCTGTTAATGTGGACTTTACTGTGGACACTAATGGTGTGTATTCAGAGCCTCGCCCCATT
GGCACCAGATACCTGACTCGTAATCTGTAATTGCTTGTTAATCAATAAACCGTTTAATTC
GTTTCAGTTGAACTTTGGTCTCTGCGTACTTCTTTCTTATCTAGTTTCCATGGCTACGTA
GATAAGTAGCATGGCGGGTTAATCATTAACTATAAGGAACCCCTAGTGATGGAGTTGGCC
ACTCCCTCTCTGCGCGCTCGCTCGCTCACTGAGGCCGGGCGACCAAAGGTCGCCCGACGC
CCGGGCTTTGCCCGGGCGGCCTCAGTGAGCGAGCGAGCGCGCAGAGAGGGAGTGGCCAA
SEQ ID NO: 91
>#985_AAV.FL.linear [organism = Adeno-associated virus][mol_type = genomic DNA]
[isolation_source = liver tissue][topology = linear]
TTGGCCACTCCCTCTCTGCGCGCTCGCTCGCTCACTGAGGCCGGGCGACCAAAGGTCGCC
CGACGCCCGGGCTTTGCCCGGGCGGCCTCAGTGAGCGAGCGAGCGCGCAGAGAGGGAGTG
GCCAACTCCATCACTAGGGGTTCCTGGAGGGGTGGAGTCGTGACGTGAAGTACGTCATAG
GGTTAGGGAGGTCCTGTATTAGAGGTCACGTGAGTGTTTTGCGACATTTTGCGACACCAT
GTGGTTACGCTGGGTATTTAAGCCCGAGTGAGCACGCAGGGTCTCCATTTTGAAGCGGGA
GGTTTGAACGCGCAGCCGCCATGCCGGGGTTTTACGAGATTGTGATTAAGGTCCCCAGCG
ACCTTGACGAGCATCTGCCCGGCATTTCTGACAGCTTTGTGAACTGGGTGGCCGAGAAGG
AATGGGAGTTGCCGCCAGATTCTGACATGGATCTGAATCTGATTGAGCAGGCACCCCTGA
CCGTGGCCGAGAAGCTGCAGCGCGACTTTCTGACGGAATGGCGCCGTGTGAGTAAGGCCC
CGGAGGCCCTTTTCTTTGTGCAATTTGAGAAGGGAGAGAGCTACTTCCACATGCACGTGC
TCGTGGAAACCACCGGGGTGAAATCCATGGTTTTGGGACGTTTCCTGAGTCAGATTCGCG
AAAAACTGATTCAGAGAATTTACCGCGGGAGCGAGCCGACTTTGCCAAACTGGTTCGCGG
TGACAAAGACCCGAAATGGCGCCGGAGGCGGGAACGAGGTGGTGGATGAGTGCTACATCC
CCAATTACTTGCTCCCCAAAACCCAGCCTGAGCTCCAGTGGGCGTGGACTAATATGGAAC
AGTATTTAAGCGCCTGTTTGAATCTCACGGAGCGTAAACGGTTGGTGGCGCAGCATCTGA
CGCACGTGTCGCAGACGCAGGAGCAGAACAAAGAGAATCAGAATCCCAATTCTGACGCGC
CGGTGATCAGATCAAAAACCTCAGCCAGGTACATGGAGCTGGTCGGGTGGCTCGTGGATA
AGGGGATTACCTCGGAGAAGCAGTGGATCCAGGAGGACCAGGCTTCATACATCTCCTTCA
ATGCGGCCTCCAACTCGCGGTCCCAAATCAAGGCTGCCTTGGACAATGCGGGGAAGATCA
TGAGCCTGACTAAAACCGCCCCCGACTACCTGGTGGGCCAGCAGCCCGTGGAGGACATTT
CCAGCAATCGGATTTATAAAATCTTGGAACTGAACGGGTACGATCCCCAATATGCGGCTT
CCGTCTTTCTGGGATGGGCCACGAAAAAGTTCGGCAAGAGGAACACCATCTGGCTGTTTG
GGCCTGCAACTACCGGGAAGACCAACATCGCGGAGGCCATAGCCCACACTGTGCCCTTCT
ACGGGTGCGTAAACTGGACCAATGAGAACTTTCCCTTCAACGACTGTGTCGACAAGATGG
TGATCTGGTGGGAGGAGGGGAAGATGACCGCCAAGGTCGTGGAGTCGGCCAAAGCCATTC
TCGGAGGAAGCAAGGTGCGCGTGGACCAGAAATGCAAGTCCTCGGCCCAGATAGACCCGA
CTCCCGTGATCGTCACCTCCAACACCAACATGTGCGCCGTGATTGACGGGAACTCAACGA
CCTTCGAACACCAGCAGCCGTTGCAAGACCGGATGTTCAAATTTGAACTCACCCGCCGCC
TGGATCATGACTTTGGGAAGGTCACAAAGCAGGAAGTCAAAGACTTTTTTCGGTGGGCAA
AGGATCACGTGGTTGAGGTGGAGCATGAATTCTACGTCAAAAAGGGTGGAGCCAAGAAAA
GACCCGCCCCCAGTGACGCAGATATAAGTGAGCCCAAACGGGCGCGCGAGTCAGTTGCGC
AGCCATCGACGTCAGACGCGGAAGCTTCGATCAACTACGCAGACAGGTACCAAAACAAAT
GTTCTCGTCACGTGGGCATGAATCTGATGCTGTTTCCCTGTAGACAATGCGAAAGAATGA
ATCAGAATTCAAATATCTGCTTCACTCACGGACAGAAAGACTGTTTAGAGTGCTTTCCCG
TGTCAGAATCTCAACCCGTTTCTGTCGTCAAAAAGGCATATCAGAAACTTTGCTACATTC
ATCATATCATGGGAAAGGTGCCAGACGCTTGCACTGCCTGCGATCTGGTCAATGTGGATT
TGGATGACTGCATCTCTGAACAATAAATGATTTAAATCAGGTATGGCTGCCGATGGTTAT
CTTCCAGATTGGCTCGAGGACACTCCCTCTGCAGGAATAAGTCAGTGGTGGAAGCTCAAA
CCTGGCCCACCACCACCAAAGCCCGCAGAGCGGCATAAGGACGACAGCAGGGGTCTTGTG
CTTCCTGGGTACAAGTACCTCGGACCCTTCAACGGACTCGACAAGGGAGAGCCGGTCAAC
GAGGCAGACGCCGCGGCCCTCGAGCACGACAAGGCCTACGACCGGCAGCTCGACAGCGGA
GACAACCCGTACCTCAAGTACAACCACGCCGACGCGGAGTTTCAGGAGCGCCTTAAAGAA
GATACGTCTTTTGGGGGCAACCTCGGACGAGCAGTCTTCCAGGCGAAAAAGAGGGTTCTT
GAACCTCTGGGCCTGGTTGAGGAACCTGTTAAGACGGCTCCGGGAAAAAAGAGGCCGGTA
GAGCACTCTCCTGTGGAGCCAGACTCCTCCTCGGGAACCGGAAAGGCGGGCCAGCAGCCT
GCAAGAAAAAGATTGAATTTCGGTCAGACTGGAGACGCAGACTCCGTACCTGACCCCCAG
CCTCTCGGACAGCCACCAGCAGCCCCCTCTGGTCTGGGAACTAATACGATGGCTACAGGC
AGTGGCGCACCAATGGCAGACAATAACGAGGGCGCCGACGGAGTGGGTAATTCCTCGGGA
AATTGGCATTGCGATTCCCAATGGCTGGGCGACAGAGTCATCACCACCAGCACCCGAACC
TGGGCCCTGCCCACCTACAACAACCACCTCTACAAGCAAATCTCCAGCCAATCAGGAGCT
TCAAATGACAACCACTACTTTGGCTACAGCACCCCCTGGGGGTATTTTGACTTCAACAGA
TTCCACTGCCACTTTTCACCACGTGACTGGCAAAGACTCATCAACAACAACTGGGGATTC
CGACCCAAGAAACTCAACTTCAAGCTCTTTAACATTCAAGTCAAAGAGGTCACGCAGAAT
GACGGTACGACGACGATTGCCAATAACCTTACCAGCACGGTTCAGGTGTTTACTGGCTCG
GGGTACGGGCTCCGGTACGTCCTCGGCTCGGCGCATCAAGGATGCCTCCCGCCGTTTCCA
GCGGACGTCTTCATGGTCCCACAGTATGGATACCTCACCCTGAACAACGGGAGTCAGGCA
GTAGGACGCTCTTCCTTTTACTGCCTGGAGTACTTTCCTTCTCAGATGCTGCGTACTGGA
AACAACTTTCAGTTCAGCTACACCTTTGAAGACGTTCCTTTCCACAGCAGCTACGCTCAC
AGCCAGAGTCTGGATCGGCTGATGAATCCTCTGATTGACCAGTACCTGTATTATCTGAAC
AAGACACAATCAAATAGTGGAACTCTTCAGCAGTCAAGGCTTCAGTTTTCTCAGGCCGGA
GCGAGTGACATTCGGGACCAGTCTAGGAACTGGCTTCCTGGACCCTGTTACCGCCAGCAG
CGAGTATCAAAGACATCTGCGGATAACAACAACAGTGAATACTCGTGGACTGGAGCTACC
AAGTACCACCTCAATGGCAGAGACTCTCTGGTGAATCCGGGCCCGGCCATGGCAAGCCAC
AAGGACGATGAAGAAAAGTTTTTTCCTCAGAGCGGGGTTCTCATCTTTGGGAAGCAAGGC
TCAGAGAAAACAAATGTGGACATTGAAAAGGTCATGATTACAGACGAAGAGGAAATCAGG
ACAACCAATCCCGTGGCTACGGAGCAGTACGGATATGTGTCAAATAATTTGCAAAACTCA
AATACTGGTCCAACTACTGGAACTGTCAATCACCAAGGAGCGTTACCTGGTATGGTGTGG
CAGGATCGAGACGTGTACCTGCAGGGACCCATTTGGGCCAAGATTCCTCACACCGATGGA
CACTTTCATCCTTCTCCACTGATGGGAGGTTTTGGACTCAAACACCCGCCTCCTCAGATC
ATGATCAAAAACACTCCCGTTCCAGCCAATCCTCCCACAAACTTCAGTTCTGCCAAGTTT
GCTTCTTTTATCACACAGTATTCCACGGGGCAGGTCAGCGTGGAGATCGAGTGGGAGCTG
CAGAAGGAGAACAGCAAACGCTGGAATCCCGAGATTCAGTACACTTCCAACTACAACAAG
TCTGTTAATGTGGACTTTACTGTGGACACTAATGGCGTGTATTCAGAGCCTCGCCCCATT
GGCACCAGATACCTGACTCGTAATCTGTAATTGCTTGTTAATCAATAAACCGTTTAATTC
GTTTCAGTTGAACTTTGGTCTCTGCGTACTTCTTTCTTATCTAGTTTCCATGGCTACGTA
GATAAGTAGCATGGCGGGTTAATCATTAACTACAAGGAACCCCTAGTGATGGAGTTGGCC
ACTCCCTCTCTGCGCGCTCGCTCGCTCACTGAGGCCGGGCGACCAAAGGTCGCCCGACGC
CCGGGCTTTGCCCGGGCGGCCTCAGTGAGCGAGCGAGCGCGCAGAGAGGGAGTGGCCAA
SEQ ID NO: 92
>#667_AAV.FL.linear [organism = Adeno-associated virus][mol_type = genomic DNA]
[isolation_source = liver tissue][topology = linear]
TTGGCCACTCCCTCTCTGCGCGCTCGCTCGCTCACTGAGGCCGGGCGACCAAAGGTCGAG
AGAGCTGCCCGCCTCGGCTCTCCGGCCTCAGTGAGCGAGCGAGCGCGCAGAGAGGGAGTG
GCCAACTCCATCACTAGGGGTTCCTGGAGGGGTGGAGTCGTGACGTGAAGTACGTCATAG
GGTTAGGGAGGTCCTGTATTAGAGGTCACGTGAGTGTTTTGCGACATTTTGCGACACCAT
GTGGTTACGCAGGGTATTTAAGCCCGAGTGAGCACGCAGGGTCTCCATTTTGAAGCGGGA
GGTTTGAACGCGCAGCCGCCATGCCGGGGTTTTACGAGATTGTGATTAAGGTCCCCAGCG
ACCTTGACGAGCATCTGCCCGGCATTTCTGACAGCTTTGTGAACTGGGTGGCCGAGAAGG
AATGGGAGTTGCCGCCAGATTCTGACATGGATCTGAATCTGATTGAGAAGGCACCCCTGA
CCGTGGCCGAGAAGCTGCAGCGCGACTTTCTGACGGAGTGGCGCCGTGTGAGTAAGGCTC
CGGAGGCCCTTTTCTTTGTGCAATTTGAGAAGGGAGAGAGCTACTTCCACATGCACGTGC
TTGTGGAGACCACTGGGGTGAAATCCATGGTTTTGGGACGTTTCCTGAGTCAGATTCGCG
AAAAACTGATTCAGAGAATTTACCGCGGGATCGAGCCGACTTTGCCAAACTGGTTCGCGG
TCACGCAGACCCTCCATGCCGCCGCAGGCGGGAACACAGTGGTGGATGAGTGCTACATCC
CCAATTACCTGCTCCCCAAAACCCAGCCTGAGCTCCAGTGGGCGTGGACTAATATGGAAC
AGTATTTAAGCGCCTGTTTGAATCTCGCGGAGCGTAAACGGTTGGTGGCGCAGCATCTGA
CGCACGTGTCGCAGACGCAGGAGCAGAACAAAGAGAATCAGAATCCCAATTCTGACGCGC
CGGTGATTAGATCAAAAACCTCAGCCAGGTACATGGAGCTGGTCGGGTGGCTCGTGGATA
AGGGGATCACCTCGGAGAAGCAGTGGATCCAGGAGGACCAGGCCTCATACATCTCCTTCA
ATGCGGCCTCCAACTCGCGGTCCCAGATCAAGGCTGCCBTGGACAATGCGGGAAAGATCA
TGAGCCTRACTAAAACCGCCCCCGACTACCTGGTGGGCCAGCAGCCCGTGGAGGACATTT
CCAGCAATCGGATTTATAAAATTTTGGAACTCAACGGGTACGATCCCCAATATGCGGCTT
CCGTCTTTCTGGGATGGGCCACGAAAAAGTTCGGCAAGAGGAACACCATCTGGCTGTTTG
GGCCTGCAACTACCGGGAAGACCAACATCGCGGAGGCCATAGCCCACACTGTGCCCTTCT
ACGGGTGCGTAAACTGGACCAATGAGAACTTTCCCTTCAACGACTGTGTCGACAAGATGG
TGATCTGGTGGGAGGAGGGAAAGATGACCGCCAAGGTCGTGGAGTCCGCCAAAGCCATTC
TCGGAGGAAGCAAGATGCGCGTGGACCAGAAATGCAAGTCCTCGGCCCAGATAGACCCGA
CTCCCGTGATCGTCACCTCCAACACCAACATGTGCGCCGTGATTGACGGGAACTCAACGA
CCTTCGAACACCAGCAGCCGTTGCAAGACCGGATGTTCAAATTTGAACTCACCCGCCGTC
TGGATCATGACTTTGGGAAGGTCACCAAGCAGGAAGTCAAAGACTTTTTCCGGTGGGCAA
AGGATCACGTGGTTGAGGTGGAGCATGAATTCTACGTCAAAAAGGGTGGAGCCAAAAAAA
GACCCGCCCCCAGTGACGCAGATATAAGTGAGCCCAAACGGGCGCGCGAGKCAGTTGCGC
AGCCATCGACGTCAGACGCGGAAGCTTCGATCAACTACGCGGACAGGTACCAAAACAAAT
GTTCTCGTCACGTGGGCATGAATCTGATGCTGTTTCCCTGCAGACAATGCGAGAGAATGA
ATCAGAATTCAAATATTTGCTTCACTCACGGACAGAAAGACTGTTTAGAGTGCTTTCCCG
TGTCAGAATCTCAACCCGTTTCTGTCGTCAAAAAGGCGTATCAGAAACTTTGCTACATTC
ATCATATCATGGGAAAGGTGCCAGACGCTTGCACTGCCTGCGATCTGGTCAATGTGGATT
TGGATGACTGCATCTCTGAACAATAAATGATTTAAATCAGGTATGGCTGCCGATGGTTAT
CTTCCAGATTGGCTCGAGGACACTCTCTCTGAAGGAATAAGACAGTGGTGGAAGCTCAAA
CCTGGCCCACCACCACCAAAGCCCGCAGAGCGGCATAAGGACGACAGCAGGGGTCTTGTG
CTTCCTGGGTACAAGTACCTCGGACCCTTCAACGGACTCGACAAGGGAGAGCCGGTCAAC
GAGGCAGACGCCGCGGCCCTCGAGCACGACAAAGCCTACGACCGGCAGCTCGACAGCGGA
GACAACCCGTACCTCAAGTACAACCACGCCGACGCGGAGTTTCAGGAGCGCCTTAAAGAA
GATACGTCTTTTGGGGGCAACCTCGGACGAGCAGTCTTCCAGGCGAAAAAGAGGGTTCTT
GAACCTCTGGGCCTGGTTGAGGAACCTGTTAAGACGGCTCCTGGAAAAAAGAGGCCGGTA
GAGCACTCTCCTGTGGAGCCAGACTCCTCCTCGGGAACCGGAAAAGCGGGCCAGCAGCCT
GCAAGAAAAAGATTGAATTTCGGTCAGACTGGAGACGCAGACTCCGTACCTGACCCCCAG
CCTCTCGGACAGCCACCAGCAGCCCCCTCTGGTCTGGGAACTAATACGATGGCTACAGGC
AGTGGCGCACCAATGGAAGACAATAACGAGGGTGCCGATGGAGTGGGTAATTCCTCAGGA
AATTGGCATTGCGATTCCCAATGGCTGGGCGACAGAGTCATCACCACCAGCACCCGAACC
TGGGCCCTGCCCACCTACAACAACCACCTCTACAAGCAAATTTGCAGCCAATCAGGAGCC
TCAAACGACAACCACTACTTTGGCTACAGCACCCGGTGGGGGGATTTTGACTTCAACAGA
TTCCACTGCCACTTTTCACCACGTGACTGGCAAAGACTCATCAACAACAACTGGGGATTC
CGGCCCAAAAGACTCAACTTCAAGCTCTTTAACATTCAAGTCAAAGAGGTCACGCAGAAT
GACGGTACGAMGACGATTGCCAATAACCTTACCAGCACGGTTCAGGTGTTTACTGACTCG
GAGTACCAGCTCCCGTACGTCCTCGGCTCGGCGCATCAAGGATGCCTCCCGCCGTTCCCA
GCGGACGTCTTCATGGTTCCACAGTATGGATACCTCACCCTGAACAACGGGAGTCAGGCG
GTAGGACGCTCTTCCTTTTACTGCCTGGAGTACTTTCCTTCTCAGATGCTGCGTACCGGA
AACAACTTTACCTTCAGCTACACCTTTGAAGACGTTCCTTTCCACAGCAGCTACGCTCAC
AGCCAGAGTCTGGATCGGCTGATGAATCCTCTGATCGACCAGTACCTGTATTACTTGAGC
AGAACAAACACTCCAAGTGGAACCACCACGCAGTCTCGGCTACTGTTTAGTCAAGCTGGA
CCCACCAGCATGTCTCTTCAAGCTAAAAACTGGCTGCCTGGACCTTGCTACAGACAGCAG
CGTCTGTCAAAGCAGGCAAACGACAACAACAACAGCAACTTTCCCTGGACTGCGGCTACA
AAGTATCATCTAAATGGCCGGGACTCGTTGGTTAATCCAGGACCAGCTATGGCCAGCCAC
AAGGACGATGAAGAAAAGTTTTTTCCTCAGAGCGGGGTTCTCATCTTTGGGAAGCAAGGC
TCAGAGAAAACAAATGTGGACATTGAAAAGGTCATGATTACAGACGAAGAGGAAATCAGG
ACAACCAATCCCGTGGCTACGGAGCAGTACGGATATGTGTCAAATAATTTGCAAAACTCA
AATACTGGTCCAACTACTGGAACTGTCAATCACCAAGGAGCGTTACCTGGTATGGTGTGG
CAGGATCGAGACGTGTACCTGCAGGGACCCATTTGGGCCAAGATTCCTCACACCGATGGA
CACTTTCATCCTTCTCCCCTCATGGGTGGATTCGGACTTAAACACCCTCCTCCACAGATC
ATGATCAAAAGCTCTSCCGTTCCAGCCAATCCTCCTACAAACTTCAGTTCTGCCAAGTTT
GCTTCTTTCATCACACAGTACTCCACGGGGCAGGTCAGCGTGGAGATCGAGTGGGAGCTG
CAGAAGGAGAACAGCAAACGCTGGAATCCCGAGATTCAGTACACTTCAAACTACAACAAG
TCTGTTAATGTGGACTTTACTGTGGACACTAATGGTGTGTATTCAGAGCCTCGCCCCATT
GGCACCAGATACCTGACTCGTAATCTGTAATTGCTTGTTAATCAATAAACCGTTTAATTC
GTTTCAGTTGAACTTTGGTCTCCGCGTACTTCTTTCTTATCTAGTTTCCATGGCTACGTA
GATAAGTAGCATGGCGGGTTAATCATTAACTACAAGGAACCCCTAGTGATGGAGTTGGCC
ACTCCCTCTCTGCGCGCTCGCTCGCTCACTGAGGCCGGGCGACCAAAGGTCGCCCGACGC
CCGGGCTTTGCCCGGGCGGCCTCAGTGAGCGAGCGAGCGCGCAGAGAGGGAGTGGCCAA
SEQ ID NO: 93
>#2806_AAV.FL.linear [organism = Adeno-associated virus][mol_type = genomic
DNA][isolation_source = liver tissue][topology = linear]
TTGGCCACTCCCTCTCTGCGCGCTCGCTCGCTCACTGAGGCCGGGCGACCAAAGGTCGCC
CGACGCCCGGGCTTTGCCCGGGCGGCCTCAGTGAGCGAGCGAGCGCGCAGAGAGGGAGTG
GCCAACTCCATCACTAGGGGTTCCTGGAGGGGTGGAGTCGTGACGTGAATTACGTCATAG
GGTTAGGGAGGTCCTGTATTAGAGGTCACGTGAGTGTTTTGCGACATTTTGCGACACCAT
GTGGTCACGCTGGGTATTTAAGCCCGAGTGAGCACGCAGGGTCTCCATTTTGAAGCGGGA
GGTTTGAACGCGCAGCCGCCATGCCGGGGTTTTACGAGATTGTGATTAAGGTCCCCAGCG
ACCTTGACGTTGTCCAGAGCAGCCTTGATTTGGGACCGCGGAAGTTGGAGGCCGAGAAGG
AATGGGAGTTGCCGCCAGATTCTGACATGGATCTGAATCTGATTGAGCAGGCACCCCTGA
CCGTGGCCGAGAAGCTGCAGCGCGACTTTCTGACGGARTGGCGCCGCGTGAGTAAGGCCC
CGGAGGCCCTCTTCTTTGTGCAATTTGAGAAGGGAGAGAGCTACTTCCACATGCACGTGC
TCGTGGAAACCACCGGGGTGAAATCCATGGTTTTGGGACGTTTCCTGAGTCAGATTCGCG
AAAAACTGATTCAGAGAATTTACCGCGGGATCGAGCCGACTTTGCCAAACTGGTTCGCGG
TCACAAAGACCAGAAATGGCGCCGGAGGCGGGAACAAGGTGGTGGATGAGTGCTACATCC
CCAATTACCTGCTCCCCAAAACCCAGCCTGAGCTCCAGTGGGCGTGGACTAATATGGAAC
AGTATTTAAGCGCCTGTTTGAATCTCGCTGAGCGTAAACGGTTGGTGGCGCAGCATCTGA
CGCACGTGTCGCAGACGCAGGAGCAGAACAAAGAGAATCAGAATCCCAATTCTGATGCGC
CGGTGATCAGATCAAAAACTTCAGCCAGGTACATGGAGCTGGTCGGGTGGCTCGTGGACA
AGGGGATTACCTCGGAGAAGCAGTGGATCCAGGAGGACCAGGCCTCATACATCTCCTTCA
ATGCGGCCTCCAACTCGCGGTCCCAAATCAAGGCTGCTCTGGACAATGCGGGAAAGATCA
TGAGCCTGACTAAAACCGCCCCAGACTACCTAGTGGGCCAGCAGCCCGTGGAGGACATTT
CCAGCAATCGGATTTATAAAATTTTGGAACTAAACGGGTACGATCCCCAATACGCGGCTT
CCGTCTTTCTGGGATGGGCCACGAAAAAGTTCGGCAAGAGGAACACCATCTGGCTGTTTG
GGCCTGCAACTACCGGGAAGACCAACATCGCGGAGGCCATAGCCCACACTGTGCCCTTCT
ACGGGTGCGTAAACTGGACCAATGAGAACTTTCCCTTCAATGACTGCGTCGACAAGATGG
TGATCTGGTGGGAGGAGGGGAAGATGACCGCCAAGGTCGTAGAGTCGGCCAAAGCCATTC
TCGGAGGAAGCAAGGTGCGCGTGGACCAGAAATGCAAGTCCTCGGCCCAGATAGACCCGA
CTCCCGTGATCGTCACCTCCAACACCAACATGTGCGCCGTGATTGACGGGAACTCAACGA
CCTTCGAACACCAGCAGCCGTTGCAAGACCGGATGTTCAAATTTGAACTCACCCGCCGTC
TGGATCATGACTTTGGGAAGGTCACAAAGCAGGAAGTCAAAGACTTTTTCCGGTGGGCAA
AGGATCACGTGGTTGAGGTGGAGCATGAATTCTACGTCAAAAAGGGTGGAGCYAAGAAAA
GGCCCGCCCCCAGTGACGCAGATATAAGTGAGCCCAAACGGGCGCGCGAGTCAGTTGCGC
AGCCATCGACGTCAGACGCGGAAGCTTCRATCAACTACGCAGACAGGTACCAAAACAAAT
GTTCTCGTCACGTGGGCATGAATCTGATGCTGTTTCCCTGCAGACAATGCGAGAGAATGA
ATCAGAATTCAAATATCTGCTTCACTCACGGACAGAAAGACTGTTTAGAGTGCTTTCCCG
TGTCAGAATCTCAACCCGTTTCTGTCGTCAAAAAGGCGTATCAGAAACTGTGCTACATTC
ATCATATCATGGGAAAGGTGCCAGACGCTTGCACTGCCTGCGACCTGGTCAATGTGGATT
TGGATGACTGCATCTCTGAACAATAAATGATTTAAATCAGGTATGGCTGCCGATGGTTAT
CTTCCAGATTGGCTCGAGGACACTCTCTCTGAAGGAATAAGACAGTGGTGGAAGCTCAAA
CCTGGCCCACCACCACCAAAGCCCGCAGAGCGGCATAAGGACAACAGCAGGGGTCTTGTG
CTTCCTGGGTACAAGTACCTCGGACCCTTCAACGGACTCGACAAGGGAGAGCCGGTCAAC
GAGGCAGACGCCGCGGCCCTCGAACACGACAAGGCCTACGACCGGCAGCTCGACAGCGGA
GACAACCCGTACCTCAAGTACAACCACGCCGACGCGGAGTTTCAGGAGCGTCTTAAAGAA
GATACGTCTTTTGGGGGCAACCTCGGACGAGCAGTCTTCCAGGCGAAAAAGAGGGTTCTT
GAACCTCTGGGCCTGGTTGAGGAGCCTGTTAAGACGGCTCCGGGAAAAAAGAGGCCGGTA
GAGCACTCTCCTGTGGAGCCAGACTCCTCCTCGGGAACCGGAAAAGCGGGCCAACAGCCT
GCGAAAAAAAGACTGAAGTTTGGTCAGACTGGAGACGCAGACTCCGTACCTGACCCCCAG
CCTCTCGGACAGCCACCAGCAGCCCCCTCTGGTCTGGGATCTACTACAATGGCTACAGGC
AGTGGCGCACCAATGGCAGACAATAACGAGGGTGCCGATGGAGTGGGTAATTCCTCGGGA
AATTGGCATTGCGATTCCACATGGATGGGCGACAGAGTCATCACCACCAGCACCCGAACC
TGGGCCCTGCCCACCTACAACAACCACCTCTACAAACAAATTTCCAGCCAATCAGGAGCC
TCGAACGACAATCACTACTTTGGCTACAGCACCCCCTGGGGGTATTTTGACTTCAACAGA
TTCCACTGCCACTTTTCACCACGTGACTGGCAAAGACTCATCAACAACAACTGGGGATTC
CGACCCAAAAGACTCAACTTCAAGCTCTTTAACATTCAAGTCAAAGAGGTCACGCAGAAT
GACGGTACGACGACGATTGCCAATAACCTTACCAGCACGGTTCAGGTGTTTACTGACTCG
GAGTACCAGCTCCCGTACGTCCTCGGCTCGGCGCATCAAGGATGCCTCCCGCCGTTCCCA
GCGGACGTCTTCATGGTCCCACAGTATGGATACCTCACCCTGAACAACGGGAGTCAGGCG
GTAGGACGCTCTTCATTTTACTGCCTGGAGTACTTTCCTTCTCAGATGCTGCGTACCGGA
AACAACTTTACCTTCAGCTACACTTTTGAGGACGTTCCTTTCCACAGCAGCTACGCTCAC
AGCCAGAGTCTGGACCGTCTCATGAATCCTCTCATTGACCAGTACCTGTATTATCTGAAC
AAGACACAATCAAATAGTGAAACAACTTTCAGTTCAGCTACACCTTTGAAGACGTTCCTT
TCCACAGCAGCTACGCTCACAGCCAGAGTCTGGCTGCCTGGACCTTGCTACAGACAGCAG
CGTTTATCAAAGCAGGCAAACGACAACAATAACAGCAACTTTCCCTGGACTGCAGCTACA
AAGTATCATCTAAATGGCCGGGACTCGTTGGTTAATCCAGGACCAGCTATGGCCAGTCAT
AAAGACGATGAAGAAAAGTTTTTCCCTCAGAGCGGGGTTCTCATCTTTGGRAAACAAGGC
TCAGARAAAACCAATGTGGACATTGAAAAGGTCATGATTACAGACGAAGAGGAAATCAGG
ACCACCAATCCCGTGGCTACGGAGCAGTACGGATATGTGTCAAATAATTTGCAAAACTCA
AATACTGGTCCAACTACTGGAACTGTCAATCACCAAGGAGCGTTACCTGGTATGGTGTGG
CAGGATCGAGACGTGTACCTGCAGGGACCCATATGGGCCAAGATTCCTCACACCGATGGA
CACTTTCATCCTTCTCCGCTGATGGGAGGTTTTGGACTTAAACACCCTCCTCCACAGATC
ATGATCAAAAACACTCCCGTTCCAGCCAATCCTCCYACAAACTTCAGTTCTGCCAAGTTT
GCTTCTTTCATCACACAGTATTCCACGGGGCAGGTCAGAGTGGAGATCGAGTGGGAGCTG
CAGAAGGAAAACAGCAAACGCTGGAATCCCGAGATCCAGTACACTTCCAACTACAACAAR
TSTGTTAATGTGGACTTTACTGTGGACACTAATGGTGTGTATTCAGAGCYTCGCCCCATT
SGCACCAGATMCCTGACTCGTAATCTGTAATTGCTTGTTAATCAATAAACCGTTTAATTC
GTTTCAGTTGAACTTTGGTCTCTGCGTATTTTTTTCTTATCTAGTTTCCATGGCTACGTA
GATAAGTAGCATGGCGAGTTAATCATTAACTCTAAGGAACCCCTAGTGATGGAGTTGGCC
ACTCCCTCTCTGCGCGCTCGCTCGCTCACTGAGGCCGGGCGACCAAAGGTCGCCCGACGC
CCGGGCTTTGCCCGGGCGGCCTCAGTGAGCGAGCGAGCGCGCAGAGAGGGAGTGGCCAA
SEQ ID NO: 94
>#217_AAV.FL.linear [organism = Adeno-associated virus][mol_type = genomic DNA]
[isolation_source = liver tissue][topology = linear]
TTGGCCACTCCCTCTCTGCGCGCTCTGAGACGGAGTTTTGCTTTTGTTGCCCAGGCTGGA
GTGCTATGGCGCGTTGCCCGGGCGGCCTCAGTGAGCGAGCGAGCGCGCAGAGAGGGAGTG
GCCAACTCCATCACTAGGGGTTCCTGGAGGGGTGGAGTCGTGACGTGAAGTACGTCATAG
GGTTAGGGAGGTCCTGTATTAGAGGTCACGTGAGTGTTTTGCGACATTTTGCGACACCAT
GTGGTCACGCTGGGTATTTAAGCCCGAGTGAGCACGCAGGGTCTCCATTTTGAAGCGGGA
GGTTTGAACGCGCAGCCGCCATGCCGGGGTTTTACGAGATTGTGATTAAGGTCCCCAGCG
ACCTTGACGAGCATCTGCCCGGCATTTCTGACAGCTTTGTGAACTGGGTGGCCGAGAAGG
AATGGGAGTTGCCGCCAGATTCTGACATGGATCTGAATCTGATTGAGCAGGCACCCCTGA
CCGTGGCCGAGAAGCTGCAGCGCGACTTTTTGACGGAGTGGCGCCGCGTGAGTAAGGCCC
CGGAGGCCCTTTTCTTTGTGCAATTTGAGAAGGGAGAGAGCTACTTCCACATGCACGTGC
TCGTGGAAACCACCGGGGTGAAATCCATGGTTTTGGGACGTTTCCTGAGTCAGATTCGCG
AAAAACTGATTCAGAGAATTTACCGCGGGATCGAGCCGACTTTGCCAAACTGGTTCGCGG
TCACAAAGACCCGAAATGGCGCCGGAGGCGGGAACAAGGTGGTGGATGAGTGCTACATCC
CCAATTACCTGCTCCCCAAAACCCAGCCTGAGCTCCAGTGGGCGTGGACTAATATGGAAC
AGTATTTAAGCGCCTGTTTGAATCTCGCGGAGCGTAAACGGTTGGTGGCGCAGCATCTGA
CGCACGTGTCGCAGACGCAGGAGCAGAACAAAGAGAATCAGAATCCCAATTCTGATGCGC
CGGTGATCAGATCAAAAACTTCAGCCAGGTACATGGAGCTGGTCGGGTGGCTCGTGGATA
AGGGGATTACCTCGGAGAAGCAGTGGATCCAGGAGGACCAGGCCTCATACATCTCCTTCA
ATGCGGCCTCCAACTCGCGGTCCCAGATCAAGGCTGCCTTGGACAATGCGGGAAAGATTA
TGAGCCTCACTAAAACCGCCCCCGACTACCTGGTGGGCCAGTCTCTCTCTCTGCACAGCC
TTTAGTACAAGTTAAAGTAAAATCTTGGAACTGAACGGGTACGATCCCCAATATGCGGCT
TCCGTCTTTCTGGGATGGGCCACGAAAAAGTTCGGCAAGAGGAACACTATCTGGCTGTTT
GGGCCTGCAACTACCGGGAAGACCAACATCGCGGAGGCCATAGCCCACACTGTGCCCTTC
TACGGGTGCGTAAACTGGACCAATGAGAACTTTCCATTCAACGACTGTGTCGACAAGATG
GTGATCTGGTGGGAGGAGGGGAAAATGACCGCCAAGGTTGTGGAGTCGGCCAAAGCCATT
CTCGGAGGAAGCAAGGTGCGCGTGGACCAGAAATGCAAGTCCTCGGCCCAGATAGACCCG
ACTCCTGTGATTGTCACCTCCAACACCAACATGTGCGCCGTGATTGACGGGAACTCAACG
ACCTTCGAGCACCAGCAGCCGTTGCAAGACCGGATGTTCAAATTTGAACTCACCCGCCGT
CTGGATCATGACTTTGGGAAGGTCACCAAGCAGGAAGTCAAAGACTTTTTCCGGTGGGCA
AAGGATCACGTGGTTGAGGTGGAGCATGAATTCTACGTCAAAAAGGGTGGAGCCAAGAAA
AGACCCGCCCCCAGTGACGCAGATATAAGTGAGCCCAAACGGGCGCGCGAGTCAGTTGCG
CAGCCATCGACGTCAGACGCGGAAGCTTCGATCAACTACGCGGACAGGTACCAAAACAAA
TGTTCTCGTCACGTGGGCATGAATCTGATGCTGTTTCCCTGCAGACAATGCGAGAGAATG
AATCAGAATTCAAATATCTGCTTCACTCACGGACAGAAAGACTGTTTAGAGTGCTTTCCC
GTGTCAGAATCTCAACCCGTTTCTGTCGTCAAAAAGGCGTATCAGAAACTTTGCTACATT
CATCATATCATGGGAAAGGTGCCAGACGCTTGCACTGCCTGCGATCTGGTCAATGTGGAT
TTGGATGACTGCATCTCTGAACAATAAATGATTTAAATCAGGTATGGCTGCCGATGGTTA
TCTTCCAGATTGGCTCGAGGACACTCTCTCTGAAGGAATAAGACAGTGGTGGAAGCTCAA
ACCTGGCCCACCACCACCAAAGCCCGCAGAGCGGCATAAGGACGACAGCAGGGGTCTTGT
GCTTCCTGGGTACAAGTACCTCGGACCCTTCAACGGACTCGACAAGGGAGAGCCGGTCAA
CGAGGCAGACGCCGCGGCCCTCGAGCACGACAAGGCCTACGACCGGCAGCTCGACAGCGG
AGACAACCCGTACCTCAAGTACAACCACGCCGACGCGGAGTTTCAGGAGCGTCTTAAAGA
AGATACGTCTTTTGGGGGCAACCTCGGACGAGCAGTCTTCCAGGCGAAAAAGAGGGTTCT
TGAACCTCTGGGCCTGGTTGAGGAACCTGTTAAGACGGCTCCGGGAAAAAAGAGGCCGGT
AGAGCACTCTCCTGTGGAGCCAGACTCCTCCTCGGGAACCGGAAAAGCGGGCCAGCAGCC
TGCAAGAAAAAGATTGAATTTTGGTCAGACTGGAGACGCAGACTCCGTACCTGACCCCCA
GCCTCTCGGACAGCCACCAGCAGCCCCCTCTGGTTTGGGATCTACTACAATGGCTACAGG
CAGTGGCGCACCAGTGGCAGACAATAACGAGGGTGCCGATGGAGTGGGTAATTCCTCAGG
AAATTGGCATTGCGATTCCCAATGGCTGGGCGACAGAGTCATCACCACCAGCACCCGAAC
CTGGGCCCTGCCCACCTACAACAACCACCTCTACAAGCAAATCTCCAGCCAATCAGGAGC
CTCAAACGACAACCACTACTTTGGCTACAGCACCCCCTGGGGGTATTTTGACTTCAACAG
ATTCCACTGCCACTTTTCACCACGTGACTGGCAAAGACTCATCAACAACAACTGGGGATT
CCGACCCAAGAGACTCAACTTCAAGCTCTTTAACATTCAAGTCAAAGAGGTCACGCAGAA
TGACGGTACGAAGACCCCCGCCAATAACCTTACCAGCACGGTTCAGGTGTTTACTGACTC
GGAGTACCAGCTCCCGTACGTCCTCGGCTCGGCGCACCAAGGATGCCTCCCGCCGTTCCC
AGCGGACGTCTTCATGGTCCCACAGTATGGATACCTCACCCTGAACAACGGGAGTCAGGC
GGTAGGACGCTCTTCCTTTTACTGCCTGGAGTACTTTCCTTCTCAGATGCTGCGTACCGG
AAACAACTTTACCTTCAGCTACACTTTTGAAGACGTTCCTTTCCACAGCAGCTACGCTCA
CAGCCAGAGTCTGGATCGGCTGATGAATCCTCTGATCGACCAGTACCTGTATTATCTGAA
CAAAACACAATCAAATAGTGGAACTAACACGCAGTCAAGGCTTCAGTTTTCTCAGGCCGG
AGCGAGTGACATTCGGGACCAGTCTAGGAACTGGCTGCCTGGACCTTGCTACAGACAGCA
GCGTCTGTCAAAGCAGGCAAACGACAACAACAACAGCAACTTTCCCTGGACAGGAGCTAC
CAAGTACCACCTCAATGGCAGAGACTCTCTGGTGAATCCGGGCCCAGCTATGGCCAGCCA
CAAAGACGATGAAGAAAAGTTTTTCCCCATGCATGGAACCCTGATATTTGGTAAACAAGG
AACAAATGCTAACGACGCAGATTTGGACAATGTCATGATTACAGATGAAGAAGAAATCCG
CACCACCAATCCCGTGGCTACGGAGCAGTACGGATATGTGTCAAATAATTTGCAAAACTC
AAATACTGGTCCAACTACTGGAACTGTCAATCACCAAGGAGCGTTACCTGGTATGGTGTG
GCAGGATCGAGACGTGTACCTGCAGGGACCCATTTGGGCCAAGATTCCTCACACCGATGG
ACACTTTCATCCTTCTCCACTGATGGGAGGTTTTGGGCTCAAACACCCGCCTCCTCAGAT
CATGATCAAAAACACTCCCGTTCCAGCCAATCCTCCTACAAACTTCAGTTCTGCCAAGTT
TGCTTCTTTCATCACACAGTACTCCACGGGGCAGGTCAGCGTGGAGATCGAGTGGGAGCT
GCAGAAGGAGAACAGCAAACGCTGGAATCCCGAAATTCAGTACACTTCCAACTACAACAA
ATCTGTTAATGTGGACTTTACTGTGGACACTAATGGTGTGTATTCAGAGCCTCGCCCCAT
TGGCACCAGATACCTGACTCGTAATCTGTAATTGCTTGTTAATCAATAAACCGTTTAATT
CGTTTCAGTTGAACTTTGGTCTCTGCGTACTTCTTTTCTTATCTAGTTTCCATGGCTACG
TAGATAAGTAGCATGGCGGGTTAATCATTAACTACAAGGAACCCCTAGTGATGGAGTTGG
CCACTCCCTCTCTGCGCGCTCGCTCGCTCACTGAGGCCGGGCGACCAAAGGTCGCCCGAC
GCCCGGGCTTTGCCCGGGCGGCCTCAGTGAGCGAGCGAGCGCGCAGAGAGGGAGTGGCCA
A
SEQ ID NO: 95
>#767_AAV.FL.linear [organism = Adeno-associated virus][mol_type = genomic DNA]
[isolation_source = liver tissue][topology = linear]
TTGGCCACTCCCTCTCTGCGCGCTCGCTCGCTCACTGAGGCCGGGCGACCAAAGGTCGCC
CGACGCCCGGGCTTTGCCCGGGCGGCCTCAGTGAGCGAGCGAGCGCGCAGAGAGGGAGTG
GCCAACTCCATCACTAGGGGTTCCTGGAGGGGTGGAGTCGTGACGTGAAGTACGTCATAG
GGTTAGGGAGGTCCTGTATTAGAGGTCACGTGAGTGTTTTGCGACATTTTGCGACACCAT
GTGGTTACGCAGGGTATTTAAGCCCGAGTGAGCACGCAGGGTCTCCATTTTGAAGCGGGA
GGTTTGAACGCGCAGCCGCCATGCCGGGATTTTACGAGATTGTGATTAAGGTCCCCAGCG
ACCTTGACGAGCATTTGCCCGGCATTTCTGACAGCTTTGTGAACTGGGTGGCCGAGAAGG
AATGGGAGTTGCCGCCAGATTCTGACATGGATCTGAATCTGATTGAGCAGGCACCCCTGA
CCGTGGCCGAGAAGCTGCAGCGCGACTTTCTGACGGAGTGGCGCCGTGTGAGTAAGGCTC
CGGAGGCCCTTTTCTTTGTGCAATTTGAGAAGGGAGAGAGCTACTTCCACATGCACGTGC
TTGTGGAGACCACTGGGGTGAAATCCATGGTTTTGGGACGTTTCCTGAGTCAGATTCGCG
AAAAACTGATTCAGAGAATTTACCGCGGGATCGAGCCGACTTTGCCAAACTGGTTCGCGG
TCACAAAGACCCGAAATGGCGCCGGAGGCGGGAACAAGGTGGTGGATGAGTGCTACATCC
CCAATTACCTGCTCCCCAAAACCCAGCCTGAGCTCCAGTGGGCGTGGACTAATATGGAAC
AGTATTTAAGCGCCTGTTTGAATCTCGCGGAGCGTAAACGGTTGGTGGCGCAGCATCTGA
CGCACGTGTCGCAGACGCAGGAGCAGAGCAAAGAAAATCAGAATCCCAATTCTGACGCGC
CGGTGATTAGATCAAAAACCTCAGCCAGGTACATGGAGCTGGTCGGGTGGCTCGTGGATA
AGGGGATCACCTCGGAGAAGCAGTGGATCCAGGAGGACCAGGCCTCATACATCTCCTTCA
ATGCGGCCTCCAACTCGCGGTCCCAGATCAAGGCTGCCTTGGACAATGCGGGAAAGATCA
TGAGCCTGACTAAAACCGCCCCCGACTACCTGGTGGGCCAGCAGCCCGTGGAGGACATTT
CCAGCAATCGGATTTATAAAATTTTGGAACTCAACGGGTACGATCCCCAATATGCGGCTT
CCGTCTTTCTGGGATGGGCCACGAAAAAGTTCGGCAAGAGGAACACCATCTGGCTGTTTG
GGCCTGCAACTACCGGGAAGACCAACATCGCGGAAGCCATAGCCCACACTGTGCCCTTCT
ACGGGTGCGTAAACTGGACCAATGAGAACTTTCCCTTCAACGACTGTGTCGACAAGATGG
TGATCTGGTGGGAGGAGGGAAAGATGACCGCCAAGGTCGTGGAGTCGGCCAAAGCCATTC
TCGGAGGAAGCAAGGTGCGCGTGGACCAGAAATGCAAGTCCTCGGCCCAGATAGACCCGA
CTCCCGTGATCGTCACCTCCAACACCAACATGTGCGCCGTGATTGACGGGAACTCAACGA
CCTTCGAACACCAGCAGCCGTTGCAAGACCGGATGTTCAAATTTGAACTCACCCGCCGTC
TGGATCATGACTTTGGGAAGGTCACCAAGCAGGAAGTCAAAGACTTTTTCCGGTGGGCAA
AGGATCACGTGGTTGAGGTGGAGCATGAATTCTACGTCAAAAAGGGTGGAGCCAAAAAAA
GACCCGCCCCCAGTGACGCAGATATAAGTGAGCCCAAACGGGCGCGCGAGTCAGTTGCGC
AGCCATCGACGTCAGACGCGGAAGCTTCGATCAACTACGCGGACAGGTACCAAAACAAAT
GTTCTCGTCACGTGGGCATGAATCTGATGCTGTTTCCCTGCAGACAATGCGAGAGAATGA
ATCAGAATTCAAATATTTGCTTCACTCACGGACAGAAAGACTGTTTAGAGTGCTTTCCCG
TGTCAGAATCTCAACCCGTTTCTGTCGTCAAAAAGGCGTATCAGAAACTTTGCTACATTC
ATCATATCATGGGAAAGGTGCCAGACGCTTGCACTGCCTGCGATCTGGTCAATGTGGATT
TGGATGACTGCATCTCTGAACAATAAATGATTTAAATCAGGTATGGCTGCCGATGGTTAT
CTTCCAGATTGGCTCGAGGACACTCTCTCTGAAGGAATAAGACAGTGGTGGAAGCTCAAA
CCTGGCCCACCACCACCAAAGCCCGCAGAGCGGCATAAAGACGACAGCAGGGGTCTTGTG
CTTCCTGGGTACAAGTACCTCGGACCCTTCAACGGACTCGACAAGGGAGAGCCGGTCAAC
GAGGCAGACGCCGCGGCCCTCGAGCACGACAAGGCCTACGACCGGCAACTCGACAGCGGA
GACAACCCGTACCTCAAGTACAACCACGCCGACGCGGAATTTCAGGAGCGCCTTAAAGAA
GATACGTCTTTTGGGGGCAACCTCGGACGAGCAGTCTTCCAGGCAAAAAAGAGGGTTCTT
GAACCTCTGGGCCTGGTTGAGGAACCTGTTAAGACGGCTCCTGGAAAAAAGAGGCCGGTA
GAGCACTCTCCTGCGGAGCCAGACTCCTCCTCGGGAACCGGAAAAGCGGGCCAGCAGCCT
GCAAGAAAAAGATTGAATTTCGGTCAGACTGGAGACGCAGACTCCGTACCTGACCCCCAG
CCTCTCGGACAGCCACCAGCAGCCCCCTCTGGTTTGGGATCTACTACAATGGCTACAGGC
AGTGGCGCACCAGTGGCAGACAATAACGAGGGTGCCGATGGAGTGGGTAATTCCTCAGGA
AATTGGCATTGCGATTCCCAATGGCTGGGCGACAGAGTCATCACCACCAGCACCCGAACC
TGGGCCCTGCCCACCTACAACAACCACCTCTACAAGCAAATTTCCAGCCAATCAGGAGCC
TCGAACCACTACTTTGGCTACAGCACCCCCTGGGGGTATTTTGACTTCAACAGATTCCAC
TGCCACTTTTCACCACGTGATTGGCAAAGACTCATCAACAACAACTGGGGATTCCGACCC
AAGAGACTCAACTTCAAGCTCTTTAACATTCAAGTCAAAGAGGTCACGCAGAATGACGGT
ACGACGACGATTGCCAATAACCTTACCAGCACGGTTCAGGTGTTTACTGACTCGGAGTAC
CAGCTCCCGTACGTCCTCGGCTCGGCGCATCAAGGATGCCTCCCGCCGTTCCCAGCGGAC
GTCTTCATGGTTCCACAGTATGGATACCTCACCCTGAACAACGGGAGTCAGGCGGTAGGA
CGCTCTTCCTTTTACTGCCTGGAGTACTTTCCTTCTCAGATGCTGCGTACCGGAAACAAC
TTTACCTTCAGCTACACTTTTGAGGACGTTCCTTTCCACAGCAGCTACGCTCACAGCCAG
AGTCTGGATCGGCTGATGAATCCTCTGATCGACCAGTACCTGTATTATCTGAACAAAACA
CAATCTAGTGGAACTCTTCAGCAGTCTCGGTTACTGTTTAGTCAAGCTGGACCCACCAGC
ATGTCTCTTCAAGCTAGGAACTGGCTTCCTGGACCCTGTTACCGCCAGCAGCGAGTATCA
AAGACATCTGCGGATAAAAACAACAGTGAATACTCGTGGACTGCGGCTACAAAGTATCAT
CTAAATGGCCGGGACTCGTTGGTTAATCCAGGACCAGCTATGGCCAGCCACAAAGACGAT
GAAGAAAAGTTTTTCCCCATGCCTGGAACCCTGATATTTGGTAAAGAAGGAACAAATGCT
AACAACGCAGAATTGGAAAATGTCATGATTACAGATGAAGAAGAAATCCGCACCACCAAT
CCCGTGGCTACGGAGCAGTACGGATATGTGTCAAATAATTTGCAAAACTCAAATACTGGT
CCAACTACTGGAACTGTCAATCACCAAGGAGCGTTACCTGGTATGGTGTGGCAGGATCGA
GACGTGTACCTGCAGGGACCCATTTGGGCCAAGATTCCTCACACCGATGGACACTTTCAT
CCTTCTCCACTGATGGGAGGTTTTGGGCTCAAACACCCACCTCCTCAGATCATGATCAAA
AACACTCCCGTTCCAGCCAATCCTCCTACAAACTTCAGTGCGGCAAAATTTGCTTCCTTT
ATCACACAGTATTCCACGGGGCAGGTCAGCGTGGAAATCGAGTGGGAGCTGCAGAAGGAG
AACAGCAAACGCTGGAATCCCGAGATCCAGTACACTTCCAACTACAACAAGTCTGTTAAT
GTGGACTTTACTGTGGACACTAATGGCGTGTATTCAGAGCCTCGCCCCATTGGCACCAGA
TACCTGACTCGTAATCTGTAATTGCTTGTTAATCAATAAACCGTTTAATTCGTTTCAGTT
GAACTTTGGTCTCTGCGTACTTCTTTTCTTATCTAGTTTCCATGGCTACGTAGATAAGTA
GCATGGAGGGTTAATCATTAACTACAAGGAACCCCTAGTGATGGAGTTGGCCACTCCCTC
TCTGCGCGCTCGCTCGCTCACTGAGGCCGGGCGACCAAAGGTCGCCCGACGCCCGGGCTT
TGCCCGGGCGGCCTCAGTGAGCGAGCGAGCGCGCAGAGAGGGAGTGGCCAA
SEQ ID NO: 96
>#1591_AAV.FL.linear [organism = Adeno-associated virus][mol_type = genomic
DNA][isolation_source = liver tissue][topology = linear]
TTGGCCACTCCCTCTCTGCGCGCTCGCTCGCTCACTGAGGCCGGGCGACCAAAGGTCGCC
CGACGCCCGGGCTTTATACGGGCGGCCTCAGTGAGCGAGCGAGCGCGCAGAGAGGGAGTG
GCCAACTCCATCACTAGGGGTTCCTGGAGGGGTGGAGTCGTGACGTGAAGTACGTCATAG
GGTTAGGGAGGTCCTGTATTAGAGGTCACGTGAGTGTTTTGCGACATTTTGCGACACCAT
GTGGTTACGCTGGGTATTTAAGCCCGAGTGAGCACGCAGGGTCTCCATTTTGAAGCGGGA
GGTTTGAACGCGCAGCCGCCATGCCGGGGTTTTACGAGATTGTGATTAAGGTCCCTAGCG
ACCTTGACGAGCATTTGCCCGGCATTTCTGACAGCTTTGTGAACTGGGTGGCCGAGAAGG
AATGGGAGTTGCCGCCAGATTCTGACATGGATCTGAATCTGATTGAGCAGGCACCCCTGA
CCGTGGCCGAGAAGCTGCAGCGCGACTTTCTGACGGAATGGCGCCGTGTGAGTAAGGCCA
CGGAGGCCCTCTTCTTTGTGCAATTTGAGAAGGGAGAGAGCTACTTCCACATGCACGTGC
TGGTGGAGACCACCGGGGTGAAATCCATGGTTTTGGGACGTTTCCTGAGTCAGATTCGCG
AAAAACTGATTCAGAGAATTTACCGCGGGATCGAGCCGACTTTGCCAAACTGGTTCGCGG
TTACAAAGACCCGAAATGGCGCCGGAGGCGGGAACAAGGTGGTGGATGAGTGCTACATCC
CCAATTACCTGCTCCCCAAAACCCAGCCTGAGCTCCAGTGGGCGTGGACTAATATGGAAC
AGTATTTAAGCGCCTGTTTGAATCTCGCGGAGCGTAAACGGTTGGTGGCGCAGCATCTGA
CGCACGTGTCGCAGACGCAGGAGCAGAACAAAGAGAATCAGAATCCCAATTCTGACGCGC
CGGTGATTAGATCAAAAACCTCAGCCAGGTACATGGAGCTTGTCGGGTGGCTCGTGGATA
AGGGGATTACCTCGGAGAAGCAGTGGATTCAGGAGGACCAGGCCTCATACATCTCCTTCA
ATGCGGCCTCCAACTCGCGGTCGCAAATCAAGGCTGCTCTGGACAATGCGGGAAAGATCA
TGAGCCTGACTAAAACCGCCCCCGACTACCTGGTGGGCCAGCAGCCCGTGGAGGACATTT
CCAGCAATCGGATTTATAAGATCTTGGAACTGAACGGGTACGATCCCCAATACGCGGCTT
CCGTATTTCTGGGATGGGCCACGAAAAAGTTCGGCAAGAGRAACACCATCTGGCTGTTTG
GGCCTGCAACTACCGGGAAGACCAACATCGCGGAGGCCATAGCCCACACTGTGCCCTTCT
ACGGGTGCGTAAACTGGACCAATGAGAACTTTCCTTTCAACGACTGTGTTGACAAGATGG
TGATCTGGTGGGAGGAGGGGAAGATGACCGCCAAGGTTGTGGAGTCGGCCAAAGCCATTC
TCGGAGGAAGCAAGGTGCGCGTGGACCAGAAATGCAAGTCCTCGGCCCAGATAGACCCGA
CTCCCGTGATCGTCACCTCCAACACCAACATGTGCGCCGTGCCAGACGCTTGCACAACGA
CCTTCGAACACCAGCAGCCGTTGCAAGACCGGATGTTCAAATTTGAACTCACCCGCCGTC
TGGATCATGACTTTGGGAAGGTCACCAAGCAGGAAGTGAAAGACTTTTTCCGGTGGGCAA
AGGATCACGTGGTTGAGGTGGAGCATGAATTCTACGTCAAAAAGGGTGGAGCCAAAAAAA
GACCCGCCCCCAGTGACGCAGATATAAGTGAGCCCAAACGGGCGCGCGAGTCAGTTGCGC
AGCCATCGACGTCAGACGCGGAAGCTTCAATCAACTACGCGGACAGGTACCAAAACAAAT
GTTCTCGTCACGTGGGCATGAATCTGATGCTGTTTCCCTGCAGACAATGCGAAAGAATGA
ATCAGAATTCAAATATCTGCTTCACTCACGGACAGAAAGACTGTTTAGAGTGCTTTCCCG
TGTCAGAATCTCAACCCGTTTCTGTCGTCAAAAAGGCGTATCAGAAACTTTGCTACATTC
ATCATATCATGGGAAAGGTGCCAGACGCTTGCACTGCCTGCGATCTGGTCAATGTGGATT
TGGATGACTGCATCTCTGAACAATAAATGATTTAAATCAGGTATGGCTGCCGATGGTTAT
CTTCCAGATTGGCTCGAGGACACTCTCTCTGAAGGAATAAGACAGTGGTGGAAGCTCAAA
CCTGGCCCACCACCACCAAAGCCCGCAGAGCGGCATAAGGACGACAGCAGGGGTCTTGTG
CTTCCTGGGTACAAGTACCTCGGACCCTTCAACGGACTCGACAAGGGAGAGCCGGTCAAC
GAGGCAGACGCCGCGGCCCTCGAGCACGACAAGGCCTACGACCGGCAGCTCGACAGCGGA
GACAACCCGTACCTCAAGTACAACCACGCCGACGCGGAGTTTCAGGAGCGTCTTAAAGAA
GATACGTCTTTTGGGGGCAACCTCGGACGAGCAGTCTTCCAGGCGAAAAAGAGGGTTCTT
GAACCTCTGGGCCTGGTTGAGGAACCTGTTAAGACGGCTCCGGGAAAAAAGAGGCCGGTA
GAGCACTCTCCTGCGGAGCCAGACTCCTCCTCGGGAACCGGAAAAGCGGGCCAGCAGCCT
GCAAGAAAAAGATTGAATTTTGGTCAGACTGGAGACGCAGACTCCGTACCTGACCCCCAG
CCTCTCGGACAGCCACCAGCAGCCCCCTCTGGTTTGGGATCTACTACAATGGCTACAGGC
AGTGGCGCACCAGTGGCAGACAATAACGAGGGTGCCGATGGAGTGGGTAATTCCTCAGGA
AATTGGCATTGCGATTCCCAATGGTTGGGCGACAGAGTCATCACCACCAGCACCCGAACC
TGGGCCCTGCCCACCTACAACAACCACCTCTACAAGCAAATCTCCAGCCAATCAGGAGCC
TCAAACGACAACCACTACTTTGGCTACAGCACCCCTTGGGGGTATTTTGACTTCAACAGA
TTCCACTGCCACTTTTCACCACGTGACTGGCAAAGACTCATCAACAACAACTGGGGATTC
CGACCCAAGAGACTCAACTTCAAGCTCTTTAACATTCAAGTCAAAGAGGTCACGCAGAAT
GACGGTACGACGACGATTGCCAATAACCTTACCAGCACGGTTCAGGTGTTTACTGACTCG
GAGTACCAGCTCCCGTACGTCCTCGGCTCGGCGCATCAAGGATGCCTCCCGCCGTTTCCA
GCGGACGTCTTCATGGTGCCACAGTATGGATACCTCACCCTGAACAACGGGAGTCAGGCG
GTAGGACGCTCTTCCTTTTACTGCCTGGAGTACTTTCCTTCTCAGATGCTGCGTACTGGA
AACAACTTTCAGTTCAGCTACACCTTTGARGACGTTCCTTTCCACAGCAGCTACGCTCAC
AGCCAGAGTCTGGATCGGCTGATGAATCCTCTGATTGACCAGTACCTGTATTATCTGAAC
AAGACACAATCAAATAGTGGAACTCTTCAGCAGTCTCGGCTACTGTTTAGTCAAGCTGGA
GCGAGTGACATTCGGGACCAGTCTAGGAACTGGCTTCCTGGACCCTGTTACCGCCAGCAG
CGAGTATCAAAGACATCTGCGGATAACAACAACAGCAACTTTCCCTGGACTGCGGCTACA
AAGTATCATCTAAATGGCCGGGACTCGTTGGTTAATCCAGGACCAGCTATGGCCAGCCAC
AAAGACGATGAAGAAAAGTTTTTCCCCATGCATGGAACCCTGATATTTGGTAAACAAGGA
ACAAATGCTAACGACGCGGATTTGGACAATGTTATGATTACAGATGAAGAAGAAATCCGC
ACCACCAATCCCGTGGCTACGGAGCAGTACGGATATGTGTCAAATAATTTGCAAAACTCA
AATACTGGTCCAACTACTGGAACTGTCAATCACCAAGGAGCGTTACCTGGTATGGTGTGG
CAGGATCGAGACGTGTACCTGCAGGGACCCATTTGGGCCAAGATTCCTCACACCGATGGA
CACTTTCATCCTTCTCCACTGATGGGAGGTTTTGGGCTCAAACACCCGCCTCCTCAGATC
ATGATCAAAAACACTCCCGTTCCAGCCAATCCTCCTACAAACTTCAGTTCTGCCAAGTTT
GCTTCTTTCATCACACAGTATTCCACGGGACAGGTCAGCGTGGAGATCGAGTGGGAGCTG
CAGAAGGAGAACAGCAAACGCTGGAATCCCGAAATTCAGTACACTTCCAACTACAACAAA
TCTGTTAATGTGGACTTTACTGTGGACACTAATGGTGTGTATTCAGAGCCTCGCCCCATT
GGCACCAGATACCTGACTCGTAATCTGTAATTGCTTGTTAATCAATAAACCGTTTAATTC
GTTTCAGTTGAACTTTGGTCTTTGCGTACTTCTTTCTTATCTAGTTTCCATGGCTACGTA
GATAAGTAGCATGGCGGGTTAATCATTAACTACAAGGAACCCCTAGTGATGGAGTTGGCC
ACTCCCTCTCTACGCGCTCGCTCGCTCACTGAGGCCGGGCGACCAAAGGTCGCCCGACGC
CCGGGCTTTGCCCGGGCGGCCTCAGTGAGCGAGCGAGCGCGCAGAGAGGGAGTGGCCAA
SEQ ID NO: 97
>#508_AAV.FL.linear [organism = Adeno-associated virus][mol_type = genomic DNA]
[isolation_source = liver tissue][topology = linear]
TTGGCCACTCCCTCTCTGCGCGCTCGCTCGCTCACTGAGGCCGGGCGACCAAAGGTCGCC
CGACGCCCGGGCTTTGCCCGGGCGGCCTCAGGGAGCGAGCGAGCGCGCAGAGAGGGAGTG
GCCAACTCCATCACTAGGGGTTCCTGGAGGGGTGGAGTCGTGACGTGAATTACGTCATAG
GGTTAGGGAGGTCCTGTATTAGAGGTCACGTGAGTGTTTTGCGACATTTTGCGACACCAT
GTGGTTACGCAGGGTATTTAAGCCCGAGTGAGCACGCAGGGTCTCCATTTTGAAGCGGGA
GGTTTGAACGCGCAGCCGCCATGCCGGGGTTTTACGAGATTGTGATTAAGGTCCCCAGCG
ACCTTGACGAGCATCTGCCCGGCATTTCTGACAGCTTTGTGAACTGGGTGGCCGAGAAGG
AATGGGAGTTGCCGCCAGATTCTGACATGGATCTGAATCTGATTGAGCAGGCACCCCTGA
CCGTGGCCGAGAAGCTGCAGCGCGACTTTCTGACAGAATGGCGCCGTGTGAGTAAAGCCC
CCGAGGCCCTTTTCTTTGTGCAATTTGAGAAGGGAGAGAGCTACTTCCACATGCACGTGC
TCGTGGAAACCACGGGGGTGAAATCCATGGTTTTGGGACGTTTCCTGAGTCAGATTCGCG
AAAAACTGATTCAGAGAATTTATCGCGGGATCGAGCCGACTTTGCCAAACTGGTTCGCGG
TCACAAAGACCCGAAATGGCGCCGGAGGCGGGAATAAGGTGGTGGATGAGTGCTACATCC
CCAATTACCTGCTCCCCAAAACCCAACCTGAGCTCCAGTGGGCGTGGACTAATATGGAAC
AGTATTTAAGCGCCTGTTTGAATCTCGCGGAGCGTAAACGGTTGGTGGCGCAGCATCTGA
CGCACGTGTCGCAGACGCAGGAGCAGAACAAAGAGAATCAGAATCCCAATTCTGACGCGC
CGGTGATCAGATCAAAAACCTCAGCCAGGTACATGGAGCTGGTCGGGTGGCTCGTGGATA
AGGGGATTACCTCGGAGAAGCAGTGGATCCAGGAGGACCAGGCTTCATACATCTCCTTCA
ATGCGGCCTCCAACTCGCGGTCCCAGATCAAGGCTGCCTTGGACAATGCGGGAAAGATCA
TGAGCCTGACTAAAACCGCCCCCGACTACCTGGTGGGCCAGCAGCCTGTGGAGGACATTT
CCGGCAATCGGATTTATAAAATCTTGGAACTGAACGGGTACGATCCCCAATACGCGGCTT
CCGTCTTTCTGGGATGGGCCACKAAAAAGTTCGGCAAGAGGAACACCATCTGGCTGTTTG
GGCCTGCAACTACCGGGAAGACCAACATCGCGGAGGCCATAGCCCACACTGTGCCCTTCT
ACGGGTGCGTAAACTGGACCAATGAGAACTTTCCKTTCAATGATTGCGTCGACAAAATGG
TGATCTGGTGGGAGGAGGGAAAGATGACCGCCAAGGTCGTGGAGTCGGCCAAAGCCATTC
TCGGAGGAAGCAAGGTGCGCGTGGACCAGAAATGCAAATCCTCGGCCCAGATAGACCCGA
CTCCCGTGATCGTCACCTCCAACACCAACATGTGCGCCGTGATTGACGGGAACTCAACGA
CCTTCGAGCACCAGCAGCCGTTGCAAGACCGGATGTTCAAACATGAACTCACCCGCCGTC
TGGATCATGACTTTGGGAAGGTCACCAAGCAGGAAGTCAAACGCTATTTCCGGTGGGCAA
AGGATCACGTGGTTGAGGTGGAGCATGAATTCTACGTCAAAAAGGGTGGAGCCAAGAAAA
GACCCGCCCCCAGTGACGCAGATATAAGTGAGCCCAAACGGGCGCGCGAGTCAGTTGCGC
AGCCATCGACGTCAGACGCGGAAGCTTCGATCAACTACGCAGACAGGTACCAAAACAAAT
GTTCTCGTCACGTGGACATGAATCTGATGCTGTTTCCCTGCAGACAATGCGAGAGAATGA
ATCAGAATTCAAATATCTGCTTCACTCACGGACAGAAAGACTGTTTAGAGTGCTTTCCCG
TGTCAGAATCTCAACCCGTTTCTGTCGTCAAAAAGGCGTATCAGAAACTTTGCTACATTC
ATCATATCATGGGAAAGGTGCCAGACGCTTGCACTGCCTGCGATCTGGTCAATGTGGATT
TGGATGACTGCATCTCTGAACAATAAATGATTTAAATCAGGTATGGCTGCCGATGGTTAT
CTTCCAGATTGGCTCGAGGACACTCTCTCTGAAGGAATAAGACAGTGGTGGAAGCTCAAA
CCTGGCCCACCACCACCAAAGCCCGCAGAGCGGCATAAGGACGACAGCAGGGGTCTTGTG
CTTCCTGGGTACAAGTACCTCGGACCTTTCAACGGACTCGACAAGGGAGAGCCGGTCAAC
GAGGCAGACGCCGCGGCCATCGAGCACGACAAGGCCTACGACCGGCAGCTCGACAGCGGA
GACAACCCGTACCTCAAGTACAACCACGCCGACGCGGAGTTTCAGGAGCGTCTTAAAGAA
GATACGTCTTTTGGGGGCAACCTCGGACGAGCAGTCTTCCAGGCGAAAAAGAGGGTTCTT
GAACMTMTGGGCCTGGTTGAGGAACCTGTTAAGACGGCTCCGGGAAAAAAGAGGCCAGTA
GCGCACTCTCCTGCGGAACCAGACTCCTCCTCGGGAACCGGAAARGCGGGCAACCAGCCT
GCAAGAAAGAGATTGAATTTCGGTCAGACTGGAGACGCAGACTCCGTACCYGACCCCCAG
CCTCTCGGACAGCCACCAGCAGCCCCCACAAGTTTGGGATCTACTACAATGGCTACAGGC
AGTGGCGCACCAATGGCAGACAATAACGAGGGTGCCGATGGAGTGGGTAATTCCTCGGGA
AATTGGCATTGCGATTCCACATGGATGGGCGACAGAGTCATCACCACCAGCACCCGAACC
TGGGCTCTGCCCACCTACAACAACCACCTCTACAAGCAGATCTCCAGCCAATCAGGAGCT
TCRAACGACAACCACTACTTTGGCTACAGCACCCCCTGGGGGTATTTTGACTTCAACAGA
TTCCACTGCCACTTTTCACCACGTGACTGGCAAAGACTCATCAACAACAACTGGGGATTC
CGACCCAAGAGACTCAACTTCAAGCTCTTTAACATTCAAGTCAAAGAGGTCACGCAGAAT
GACGGTACGACGACGATTGCCAATAACCTTACCAGCACGGTTCAGGTGTTTACTGACTCG
GAGTACCAGCTCCCGTACGTCCTCGGCTCGGCGCATCAAGGATGCCTCCCGCCGTTTCCA
GCGGACGTCTTCATGGTCCCACAGTATGGATACCTCACCCTGAACAACGGGAGTCAGGCG
GTAGGACGCTCTTCCTTTTACTGCCTGGAGTACTTTCCTTCTCAAATGCTGCGTACTGGA
AACAACTTTCAGTTCAGCTACACTTTTGAAGACGTGCCTTTCCACAGCAGCTACGCTCAC
AGCCAGAGTTTGGATCGGCTGATGAATCCTCTGATCGACCAGTACCTGTATTATCTAAAC
AGGACACAAACAGCCAGTGGAACTCAGCAGTCTCGGCTACTGTTTAGCCAAGCTGGACCC
ACCAGCATGTCTCTTCAAGCTAAAAACTGGCTGCCTGGACCTTGCTACAGACAGCAGCGT
CTGTCAAAGCAGGCAAACGACAACAACAACAGCAACTACTCGTGGACTGGAGCTACCAAG
TACCACCTCAATGGTAGAGACTCTTTGGTGWACCCGGGCCCTGCTATGGCCAGCCACRAA
GACGATGAAGRAAAGTTTTTCCCCATGCATGGAACCCTGATATTTGGTAAAGAAGGAACA
AATGCTACCAACGCGGATTTGGACAATGTCATGATTACAGACGAAGAGGAAATCAGGACA
ACAAATCCTGTAGCTACGGAGCAGTACGGATATGTGTCAAATAATTTGCAAAACTCAAAC
ACTGCTGCAACTACTGAAACTGTCAATCACCAAGGAGCGTTACCTGGTATGGTGTGGCAG
GACCGAGACGTGTACCTACAGGGACCCATTTGGGCCAAGATTCCTCACACCGATGGACAC
TTTCATCCTTCTCCCCTCATGGGCGGATTCGGACTCAAAAACCCACCTCCTCAGATCATG
ATCAAAAACACTCCCGTTCCAGCCAATCCTCCCACAAACTTCAGTTCTGCCAAGTTTGCT
TCTTTCATCACACAGTATTCCACGGGGCAGGTCAGCGTGGAGATCGAGTGGGAGCTGCAG
AAGGAGAACAGCAAACGCTGGAATCCCGAGATCCAGTACACTTCCAACTACAACAAGTCT
GTTAATGTGGACTTTACTGTGGACACTAATGGTGTGTATTCAGAGCCTCGCCCCATTGGC
ACCAGATACCTGACTCGTAATCTGTAATTGCTTGTTAATCAATAAACCGTTTAATTCGTT
TCAGTTGAACTTTGGTCTCCGCGTCACGACTCCACCCCTAGTTTCCATGACTACGTAGAT
AAGTAGCATGGCGGGTTAATCATTAACTCTAAGGAACCCCTAGTGATGGAGTTGGCCACT
CCCTCTCTGCGCGCTCGCTCGCTCCCTGAGGCCGGGCGACCAAAGGTCGCCCGACGCCCG
GGCTTTGCCCGGGCGGCCTCAGTGAGCGAGCGAGCGCGCAGAGAGGGAGTGGCCAA
SEQ ID NO: 98
>#1704_AAV.FL.linear [organism = Adeno-associated virus][mol_type = genomic
DNA][isolation_source = liver tissue][topology = linear]
TTGGCCACTCCCTCTCTGCGCGCTCGCTCGCTCACTGAGGCCGGGCGACCAAAGGTCGCC
CGACGCCCGGGCTTTGCCCGGGCGGCCTCAGTGAGCGAGCGAGCGCGCAGAGAGGGAGTG
GCCAACTCATCACTAGGGGTTCCTGGAGGGGTGGAGTCGTGACGTGAAGTACGTCATAGG
GTTAGGGAGGTCCTGTATTAGAGGTCACGTGAGTGTTTTGCGACATTTTGCGACACCATG
TGGTCACGGTGGGTATTTAAGCCCAAGTGAGCACGCAGGGTCTCCATTTTGAAGCGGGAG
GTTTGAATACGCAGCCGCCATGCCGGGGTTTTACGAGATTGTGATTAAGGTCCCAAGCGA
CCTTGACGAGCATTTGCCCGGCATTTCTGACAGCTTTGTGAACTGGGTGGCCGAGAAGGA
ATGGGAGTTGCCGCCAGATTCTGACATGGATCTGAATCTGATTGAGCAGGCACCCCTGAC
CGTGGCCGAAAAGCTGCAGCGCGACTTTCTGACAGAATGGCGCCGTGTGAGTAAGGCCCC
CGAGGCCCTTTTCTTTGTGCAATTTGAGAAGGGAGAGAGCTATTTCCACATGCACGTGCT
CGTGGAGACCACGGGGGTAAAATCCATGGTTTTAGGACGTTTCCTGAGTCAGATTCGCGA
AAAACTGATTCAGAGAATTTACCGCGGGATCGAGCCGACTTTGCCAAATTGGTTTGCGGT
CACAAAGACTCGAAATGGCGCCGGAGGCGGGAACAAGGTGGTGGATGAGTGCTACATCCC
CAATTACCTGCTCCCCAAAACCCAACCTGAGCTCCAGTGGGCGTGGACTAATATGGAACA
GTATTTAAGCGCCTGTTTGAACCTCGCGGAGCGTAAACGGTTGGTGGCGCAGCATCTGAC
GCACGTGTCGCAGACCCAGGAGCAGAACAAAGAGAATCAGAATCCCAATTCTGACGCGCC
GGTGATTAGATCAAAAACCTCAGCCAGGTACATGGAGCTGGTCGGGTGGCTCGTGGATAA
GGGGATTACCTCTGAGAAGCAGTGGATTCAGGAGGACCAGGCCTCATACATCTCCTTCAA
TGCGGCCTCCAACTCGCGGTCCCAAATCAAGGCTGCTCTGGACAATGCGGGAAAAATCAT
GAGCCTGACTAAAACGGCCCCCGACTACCTGGTGGGCCAGCAGCCCGTGGAGGACATCTC
CGGCAATCGGATTTATAAAATCTTGGAACCGAACGGGTACGATCCCCAATACGCGGCTTC
CGTCTTTCTGGGATGGGCCACGAAAAAGTTCGGCAAGAGGAACACCATCTGGCTGTTTGG
GCCTGCAACTACCGGGAAGACCAACATCGCGGAGGCCATAGCCCACACTGTGCCCTTCTA
CGGGTGCGTAAACTGGACCAATGAAAACTTTCCTTTCAACGATTGCGTCGACAAGATGGT
GATCTGGTGGGAGGAGGGGAAGATGACCGCCAAGGTCGTGGAGTCGGCCAAAGCCATTCT
CGGAGGAAGCAAGGTGCGCGTGGACCAGAAATGCAAGTCCTCGGCCCAGATCGACCCGAC
TCCCGTGATCGTCACCTCCAACACCAACATGTGCGCCGTGATTGACGGGAACTCAACGAC
CTTCGAGCACCAGCAGCCGTTGCAAGGGATGTTCAAATTTGAACTTACCCGCCGTCTGGA
TCATGACTTTGGGAAGGTCACCAAGCAGGAAGTCAAAGACTTTTTCCGGTGGGCAAAGGA
TCACGTGGTTGAGGTGGAGCATGAATTCTACGTCAAAAAGGGTGGAGCCAAGAAAAGACC
CGCCCCCAGTGACGCAGATATAAGTGAGCCCAAACGGGCGCGCGAGTCAGTTGCGCAGCC
ATCGACGTCAGACGCGGAAGCTTCGATCAACTACGCGGACAGGTACCAAAACAAATGTTC
TCGTCACGTGGGCATGAATCTGATGCTGTTTCCCTGCAGACAATGCGAGAGAATGAATCA
GAATTCAAATATCTGCTTTACTCACGGACAGAAAGACTGTTTAGAGTGCTTTCCCGTGTC
AGAATCTCAACCCGTTTCTGTCGTCAAAAAGGCGTATCAGAAACTTTGCTACATTCATCA
TATCATGGGAAAGGTGCCAGACGCTTGCACTGCTTGCGACCTGGTCAATGTGGATTTGGA
TGACTGCATCTCTGAACAATAAATGATTTAAATCAGGTATGGCTGCCGATGGTTATCTTC
CAGATTGGCTCGAGGACACTCTCTCTGAAGGAATAAGACAGTGGTGGAAGCTCAAACCTG
GCCCACCACCACCAAAGCCCGCAGAGCGGCATAAGGACGACAGCAGGGGTCTTGTGCTTC
CTGGGTACAAGTACCTCGGACCCTTCAACGGACTCGACAAAGGAGAGCCGGTCAACGAGG
CAGACGCCGCGGCCCTCGAGCACGACAAGGCCTACGACCGGCAGCTCGACAGCGGAGACA
ACCCGTACCTCAAGTACAACCACGCCGACGCGGAGTTCCAGGAGCGCCTTAAAGAAGATA
CGTCTTTTGGGGGCAACCTCGCAAGAGCAGTTTTCCAGGCAAAAAAGAGGGTTCTTGAAC
CTCTGGGCCTGGTTGAGGAACCTGTTAAGACGGCTCCGGGAAAAAAGAGGCCGGTAGAGC
ACTCTCCTGCGGAGCCAGATTCCTCCTCCGGAACTGGAAAGTCGGGCAACCAGCCTGCAA
GAAAGAGATTGAATTTTGGTCAGACTGGAGACGCAGACTCCGTACCTGACCCCCAGCCTC
TCGGACAGCCACCAGCAGCCCCCTCTGGTTTGGGATCTACTACAATGGCTACAGGCAGTG
GCGCACCAGTGGCAGACAATAACGAGGGTGCCGATGGAGTGGGTAATTCCTCGGGAAATT
GGCATTGCGATTCCCAATGGCTGGGCGACAGAGTCATCACCACCAGCACCCGAACCTGGG
CCCTGCCCACCTACAACAACCACCTCTACAAGCAAATCTCCAGCCAATCAGGAGCCTCGA
ACGACAACCACTACTTTGGCTACAGCACCCCTTGGGGGTATTTTGACTTCAACAGATTCC
ACTGCCACTTCTCGCCACGCGATTGGCAAAGACTCATCAACAACAACTGGGGATTCCGGC
CCAAGAGACTCAACTTCAAGCTCTTTAACATTCAAGTCAAAGAGGTCACGCAGAATGACG
GTACGACGACGATTGCCAATAACCTTACCAGCACGGTTCAGGTGTTTACTGACTCGGAGT
ACCAGCTCCCGTACGTCCTCGGCTCGGCGCATCAAGGATGCCTCCCGCCGTTCCCAGCAG
ACGTCTTCATGGTCCCACAGTATGGATACCTCACCCTGAACAACGGGAGTCAGGCGGTAG
GACGCTCTTCCTTTTACTGCCTGGAGTACTTTCCTTCTCAGATGCTACGTACCGGAAACA
ATTTCACCTTCAGCTACACTTTTGAAGACGTTCCTTTCCACAGCAGCTACGCTCACAGCC
AGAGTCTGGATCGGCTGATGAATCCTCTCATCGACCAGTACCTGTATTATCTGAACAAGA
CACAAACAAATAGTGGAACTCTTCAGCAGTCTCGGCTACTGTTTAGTCAAGCTGGACCCA
CCAGCATGTCTCTTCAAGCTAAAAACTGGCTGCCTGGACCTTGCTACAGACAGCAGCGTC
TGTCAAAGCAGGCAAACGACAACAACAACAGCAATTTTCCCTGGACTGCGGCTACAAAGT
ATCATCTAAATGGCCGGGACTCTCTGGTGAATCCAGGACCAGCTATGGCCAGTCACAAGG
ATGACGAAGAAAAGTTTTTCCCCATGCATGGAACATTGATATTTGGTAAACAAGGAACAA
ATGCCAACGACGCGGATTTGGAAAATGTTATGATTACAGATGAAGAAGAAATCAGGACCA
CCAATCCCGTGGCTACGGAGCAGTACGGATATGTGTCAAATAATTTGCAAAACTCAAACA
CTGGTCCAACTACTGGAACTGTCAATCACCAAGGAGCGTTACCTGGTATGGTGTGGCAGG
ATAGAGACGTATACCTACAGGGTCCCATTTGGGCCAAGATTCCTCACACCGATGGACACT
TTCATCCTTCTCCGCTGATGGGAGGTTTTGGACTCAAACACCCGCCTCCTCAGATCATGA
TCAAAAACACTCCCGTTCCAGCCAATCCTCCCACGAACTTCAGTTCTGCCAAGTTTGCTT
CTTTCATCACACAGTATTCCACGGGGCAGGTCAGCGTGGAGATCGAGTGGGAGCTGCAGA
AGGAGAACAGCAAACGCTGGAATCCCGAGATCCAGTACACTTCCAACTACAACAAGTCTG
TTAATGTGGACTTTACTGTGGACACTAATGGCGTGTATTCAGAGCCTCGCCCCATTGGCA
CCAGATACCTGACTCGTAATCTGTAATTGCTTGTTAATCAATAAACCGTTTAATTCGTTT
CAGTTGAACTTTGGTCTCTGCGTACTTCTTTTCTTATCTAGTTTCCATGGCTACGTAGAT
AAGTAGCATGGAGGGTTAATCATTAACTACAAGGAACCCCTAGTGATGGAGTTGGCCACT
CCCTCTCTGCGCGCTCGCTCGCTCACTGAGGCCGGGCGACCAAAGGTCGCCCGACGCCCG
GGCTTTGCCCGGGCGGCCTCAGTGAGCGAGCGAGCGCGCAGAGAGGGAGTGGCCAA
SEQ ID NO: 99
>#2112_AAV.FL.linear [organism = Adeno-associated virus][mol_type = genomic
DNA][isolation_source = liver tissue][topology = linear]
TTGGCCACTCCCTCTCTGCGCGCTCGCTCGCTCACTGAGGCCGGGCGACCAAAGGTCGCC
CGACGCCCGGGCTTTGCCCGGGCGGCCTCAGTGAGCGAGCGAGCGCGCAGAGAGGGAGTG
GCCAACTCCATCACTAGGGGTTCCTGGAGGGGTGGAGTCGTGACGTGAAGTACGTCATAG
GGTTAGGGAGGTCCTGTATTAGAGGTCACGTGAGTGTTTTACGACATTTTGCGACACCAT
GTGGTCACGCTGGGTATTTACGCCCGAGTGAGCACGCAGGGTCTCCATTTTGAAGCGGGA
GGTTTGAACGCGCAGCCGCCATGCCGGGATTTTACGAGATTGTGATTAAGGTCCCCAGCG
ACCTTGACGAGCATTTGCCCGGCATTTCTGACAGCTTTGTGAACTGGGTGGCCGAGAAGG
AATGGGAGTTGCCGCCAGATTCTGACATGGATCTGAATCTGATTGAGCAGGCACCCCTGA
CCGTGGCCGAAAAGCTGCAGCGCGACTTTCTGACGGAGTGGCGCCGTGTGAGTAAGGCCC
CGGAGGCCCTTTTCTTTGTGCAATTTGAGAAGGGAGAGAGCTACTTCCACATGCACGTGC
TTGTGGAAACCACCGGGGTGAAATCCATGGTTTTGGGACGTTTCCTGAGTCAGATTCGCG
AAAAACTGATTCAGAGAATTTACCGCGGGATCGAGCCGACTTTGCCAAACTGGTTTGCGG
TCACAAAGACCCGAAATGGCGCCGGAGGCGGGAACAAGGTGGTGGATGAGTGCTACATCC
CCAATTACCTGCTCCCCAAAACCCAGCCTGAGCTCCAGTGGGCGTGGACTAATATGGAAC
AGTATTTAAGCGCCTGTTTGAATCTCGCGGAGCGTAAACGGTTGGTGGCGCAGCATCTGA
CGCACGTGTCGCAGACGCAGGAGCAGAACAAAGAGAATCAGAATCCCAATTCTGACGCGC
CGGTGATCAGATCAAAAACCTCAGCCAGGTACATGGAGCTGGTCGGGTGGCTCGTGGATA
AGGGGATTACCTCGGAGAAGCAGTGGATCCAGGAGGACCAGGCTTCATACATCTCCTTCA
ATGCGGCCTCCAACTCGCGGTCCCAAATTAAGGCTGCTCTGGACAATGCGGGAAAGATCA
TGAGCCTGACTAAAACCGCCCCCGACTACCTGGTGGGCCAGCAGCCCGTGGAGGACATTT
CCAGCAATCGGATTTATAAAATCTTGGAACTGAACGGGTACGATCCCCAATACGCGGCTT
CCGTCTTTCTGGGATGGGCCACGAAAAAGTTCGGCAAGAGAAACACCATCTGGCTGTTTG
GACCTGCGACCACGGGGAAGACCAACATCGCGGAGGCCATAGCCCACACTGTGCCCTTCT
ACGGGTGCGTAAACTGGACCAATGAGAACTTTCCTTTCAATGATTGCGTCGACAAGATGG
TGATCTGGTGGGAGGAGGGAAAGATGACCGCCAAGGTCGTGGAGTCGGCCAAAGCCATTC
TCGGAGGAAGCAAGGTGCGCGTGGACCAGAAATGCAAGTCCTCGGCCCAGATAGACCCGA
CTCCCGTGATCGTCACCTCCAACACCAACATGTGCGCCGTGATYGACGGGAACTCAACGA
CCTTCGAACACCAGCAGCCGTTGCAAGACCGGATGTTCAAATTTGAACTCACCCGCCGTC
TGGATCATGACTTTGGGAAGGTCACAAAGCAGGAAGTCAAAGACTTTTTCCGGTGGGCAA
AGGATCACGTGGTTGAGGTGGAGCATGAATTCTACGTCAAAAAGGGTGGAGCCAAGAAAA
GACCCGCCCCTAGTGACGCAGATATAAGTGAGCCCAAACGGGCGCGCGAGTCAGTTGCGC
AGCCATCGACGTCAGACGCAGAAGCTTCGATCAACTACGCGGACAGGTACCAAAACAAAT
GTTCTCGTCACGTGGGCATGAATCTGATGCTGTTTCCCTGCAGACAATGCGAGAGAATGA
ATCAGAATTCAAATATCTGCTTCACTCACGGACAGAAAGACTGTTTAGAGTGCTTTCCCG
TGTCAGAATCTCAACCCGTTTCTGTCGTCAAAAAGGCGTATCAGAAACTGTGCTACATTC
ATCATATCATGGGAAAGGTGCCAGACGCTTGCACTGCCTGCGATCTGGTCAATGTGGATT
TGGATGACTGCATCTCTGAACAATAAATGATTTAAATCAGGTATGGCTGCCGATGGTTAT
CTTCCAGATTGGCTCCAAGAAAACCTATTTTTCGATATACGACAGTGGTGGAAGCTCAAA
CCTGGCCCACCACCACCAAAGCCCGCAGAGCGGCATCAGGACAACAGCAGGGGTCTTGTG
CTTCCTGGGTACAAGTACCTCGGACCCTTCAACGGACTCGACAAGGGAGAGCCGGTCAAC
GAGGCAGACGCCGCGGCCCTCGAGCACGACAAGGCCTACGACCGGCAGCTCGACAGCGGA
GACAACCCGTACCTCAAGTACAACCACGCCGACGCGGAGTTTCAGGAGCGTCTTAAAGAA
GATACGTCTTTTGGGGGCAACCTCGGACGAGCAGTCTTCCAGGCGAAAAAGAGGGTTCTT
GAACCTCTGGGCCTGGTTGAGGAGCCTGTTAAAACGGCTCCGGGAAAAAAGAGGCCGGTA
GAGCACTCTCCTGCGGAGCCAGACTCCTCCTCGGGAACCGGAAAAGCGGGCAASCAGCCT
GCGRGAAAAAGATTGAATTTTGGTCAGACTGGAGWCGCAGACTCCGTACCTGACCCCCAG
CCTCTCGGACAGCCACCAGCAGCCCCCTCTGGTCTGGGAACTAATACGATGGCTACAGGC
AGTGGCGCACCAGTGGCAGACAATAACGAGGGTGCCGATGGAGTGGGTAATTCCTCAGGA
AATTGGCATTGCGATTCCCAATGGCTGGGCGACAGAGTCATCACCACCAGCACCCGAACC
TGGGCCCTGCCCACCTACAACAACCACCTCTACAAGCAAATCTCCAGCCAATCAGGAGCC
TCAAACGACAACCACTACTTTGGCTACAGCACCCCCTGGGGGTATTTTGACTTCAACAGA
TTCCACTGCCACTTTTCACCACGTGACTGGCAAAGACTCATCAACAACAACTGGGGATTC
CGACCCAAGAGACTCAACTTCAAGCTCTTTAACATTCAAGTCAAAGAGGTCACGCAGAAT
GACGGTACGACGACGATTGCCAATAACCTTACCAGCACGGTTCAGGTGTTTACTGACTCG
GAGTACCAGCTCCCGTACGTCCTCGGCTCGGCGCATCAAGGATGCCTCCCGCCGTTCCCA
GCGGACGTCTTCATGGTGCCACAGTATGGATACCTCACCCTGAACAACGGGAGTCAGGCG
GTAGGACGCTCTTCATTTTACTGCCTGGAGTACTTTCCTTCTCAGATGCTTCGTACTGGA
AACAACTTTCAGTTCAGCTACACCTTTGAAGACGTTCCTTTCCACAGCAGCTACGCTCAC
AGCCAGAGTCTGGATAGGCTGATGAATCCTCTGATTGACCAGTACCTGTATTATCTGAAC
AAAACACAATCAAATAGTGGAACTCTTCAGCAGTCTCGGCTACTGTTTAGTCAAGCTGGA
CCCACCAGCATGTCTCTTCAAGCTAAAAACTGGCTGCCTGGACCTTGCTACAGACAGCAG
CGTCTGTCAAAGCAGGCAAACGACAACAACAAAGCAGGCAAACGACAACAACAACAGCAA
CTTTCCCTGGACTGCGGCTACAAAGTATCAACTAAATGGCCGGGACCAGCTATGGCCAGC
CACAAAGACGATGAAGAAAAGTTTTTCCCCATGCATGGAACCCTGATATTTGGTAAACAA
GGAACAAATGCTAACGACGCGGATTTGGACAATGTCATGATTACAGATGAAGAAGAAATC
CGCACCACCAATCCCGTGGCTACGGAGCAGTACGGATATGTGTCAAATAATTTGCAAAAC
TCAAATACTGGTCCAACTACTGGAACTGTCAATCACCAAGGAGCGTTACCTGGTATGGTG
TGGCAGGATCGAGACGTGTACCTGCAGGGACCCATTTGGGCCAAGATTCCTCACACCGAT
GGACACTTTCATCCTTCTCCACTGATGGGAGGTTTTGGGCTCAAACACCCGCCTCCTCAG
ATCATGATCAAAAACACTCCCGTTCCAGCCAATCCTCCCACAAACTTCAGTTCTGCCAAG
TTTGCTTCTTTCATCACACAGTATTCCACGGGGCAGGTCAGCGTGGAGATCGAGTGGGAG
CTGCAGAAGGAGAACAGCAAACGCTGGAATCCCGAGATCCAGTACACTTCCAACTACAAC
AAGTCTGTTAATGTGGACTTTACTGTGGACACTAATGGTGTGTATTCAGAGCCTCGCCCC
ATTGGCACCAGATACCTGACTCGTAATCTGTAATTGCTTGTTAATCAATAAACCGTTTAA
TTCGTTTCAGTTGAACTTTGGTCTCTGTGTACTTCTTTCTTATCTAGTTTCCATGGCTAC
GTAGATAAGTAGCATGGCGGGTTAATCATTAACTACAAGGAACCCCTAGTGATGGAGTTG
GCCACTCCCTCTCTGCGCGCTCGCTCGCTCACTGAGGCCGGGCGACCAAAGGTCGCCCGA
CGCCCGGGCTTTGCCCGGGCGGCCTCAGTGAGCGAGCGAGCGCGCAGAGAGGGAGTGGCC
AA
SEQ ID NO: 100
>#1350_AAV.FL.linear [organism = Adeno-associated virus][mol_type = genomic
DNA][isolation_source = liver tissue][topology = linear]
TTGGCCACTCCCTCTCTGCGCGCTCGCTCGCTCACTGAGGCCGGGCGACCAAAGGTCGCC
CGACGCCCGGGCTTTGCCCGGGCGGCCTCAGTGAGCGAGCGAGCGCGCAGAGAGGGAGTG
GCCAACTCCATCACTAGGGGTTCCTGGAGGGGTGGAGTCGTGACGTGAAGTACGTCATAG
GGTTAGGGAGGTCCTGTATTAGAGGTCACGTGAGTGTTTTGCGACATTTTGCGACACCAT
GTGGTTACGCTGGGTATTTAAGCCCGAGTGAGCACGCAGGGTCTCCATTTTGAAGCGGGA
GGTTTGAACGCGCAGCCGCCATGCCGGGTTTTTACGAGATTGTGATTAAGGTCCCCAGCG
ACCTTGACGAGCATTTGCCCGGCATTTCTGACAGCTTTGTGAACTGGGTGGCCGAGAAGG
AATGGGAGTTGCCGCCAGATTCTGACATGGATCTGAATCTGATTGAGCAGGCACCCCTGA
CCGTGGCCGAGAAGCTGCAGCGCGACTTTCTGACGGAGTGGCGCCGCGTGAGTAAGGCTC
CGGAAGCCCTTTTTTTTGTGCAATTTGAGAAGGGAGAGAGCTACTTCCACATGCACGTGC
TGGTGGAGACCACCGGGGTGAAATCCATGGTCTTAGGACGTTTCCTGAGTCAGATTCGCG
AAAAACTGATTCAGAGAATTTACCGCGGGATCGAGCCGACTTTGCCAAATTGGTTCGCGG
TTACAAAGACCCGAAATGGCGCCGGAGGCGGGAACAAGGTGGTGGATGAGTGCTATATCC
CCAATTACCTGCTCCCCAAAACCCAGCCTGAGCTCCAGTGGGCGTGGACTAATATGGAAC
AGTATTTAAGCGCCTGTTTGAATCTCGCGGAGCGTAAACGGTTGGTGGCGCAGCATCTGA
CGCACGTGTCGCAGACGCAGGAGCAGAACAAAGAAAATCAGAATCCCAATTCTGACGCGC
CGGTGATTAGATCAAAAACCTCAGCCAGGTACATGGAGCTGGTCGGGTGGCTCGTGGATA
AGGGGATTACCTCGGAGAAGCAGTGGATCCAGGAGGACCAGGCTTCATACATCTCCTTTA
ATGCGGCCTCCAACTCGCGGTCCCAAATCAAGGCTGCTCTGGACAATGCGGGGAAGATCA
TGAGCCTGACTAAAACCGCCCCCGACTACCTGGTGGGCCAGCAGCCCGTGGAGGACATTT
CCAGCAATCGGATTTATAAAATCTTGGAACTGAACGGGTACGATCCCCAATATGCGGCTT
CCGTCTTTCTGGGATGGGCCACGAAAAAGTTCGGCAAGAGGAACACCATCTGGCTGTTTG
GGCCTGCAACTACCGGGAAGACCAACATCGCGGAGGCCATAGCCCACACTGTGCCTTTTT
ACGGGTGCGTAAACTGGACCAATGAGAACTTTCCATTCAACGACTGTGTTGACAAGATGG
TGATCTGGTGGGAGGAGGGAAAGATGACCGCCAAGGTCGTGGAGTCGGCCAAAGCCATTC
TCGGAGGAAGCAAGGTGCGCGTGGACCAGAAATGCAAGTCCTCGGCCCAGATAGACCCGA
CTCCCGTGATCGTCACCTCCAACACCAACATGTGCGCCGTGATTGACGGGAACTCAACGA
CCTTCGAACACCAGCAGCCGTTGCAGGACCGGATGTTCAAATTTGAACTCACCCGCCGTC
TGGATCATGACTTTGGGAAGGTCACCAAGCAGGAAGTCAAAGACTTTTTCCGGTGGGCAA
AGGATCACGTGGTTGAGGTGGAGCATGAATTCTACGTCAAAAAGGGTGGAGCCAAGAAAA
GACCCGCCCCCAGTGACGCAGATATAAGTGAGCCCAAACGGGCGCGCGAGTCAGTTGCGC
AGCCATCGACGTCAGACGCGGAAGCTTCGATCAACTACGCGGACAGGTACCAAAACAAAT
GTTCTCGTCACGTGGGCATGAATCTGATGCTGTTTCCCTGCAGACAATGCGAGAGAATGA
ATCAGAATTCAAATATCTGCTTCACTCACGGACAGAAAGACTGTTTAGAGTGCTTTCCCG
TGTCAGAATCTCAACCCGTTTCTGTCGTCAAAAAGGCGTATCAGAAACTTTGCTACATTC
ATCATATCATGGGAAAGGTGCCAGACGCTTGCACTGCCTGCGACCTGGTCAATGTGGATT
TGGATGACTGCATCTCTGAACAATAAATGATTTAAATCAGGTATGGCTGCCGATGGTTAT
CTTCCAGATTGGCTCGAGGACACTCTCTCTGAAGGAATAAGACAGTGGTGGAAGCTCAAA
CCTGGCCCACCACCACCAAAGCCCGCAGAGCGGCATAAGGACGACAGCAGGGGTCTTGTG
CTTCCTGGGTACAAGTACCTCGGACCCTTCAACGGACTCGACAAGGGAGAGCCGGTCAAC
GAGGCAGACGCCGCGGCCCTCGAGCACGACAAGGCCTACGACCGGCAGCTCGACAGCGGA
GACAACCCGTACCTCAAGTACAACCACGCCGACGCGGAGTTTCAGGAGCGTCTTAAAGAA
GATACGTCTTTTGGGGGCAACCTCGGACGAGCAGTCTTCCAGGCGAAAAAGAGGGTTCTT
GAACCTCTGGGCCTGGTTGAGGAACCTGTTAAAACGGCTCCGGGAAAAAAGAGGCCGGTA
GAGCACTCTCCTGTGGAGCCAGACTCCTCCTCGGGAACCGGAAAAGCGGGCCAGCAGCCT
GCAAGAAAAAGACTGAATTTCGGTCAGACTGGAGACGCAGACTCCGTACCTGACCCCCAG
CCTCTCGGACAGCCACCAGCAGCCCCCTCTGGTCTGGGATCTACTACAATGGCTACAGGC
AGTGGCGCACCAATGGCAGACAATAACGAGGGTGCCGATGGAGTGGGTAATTCCTCAGGA
AATTGGCATTGCGATTCCCAATGGCTGGGCGACAGAGTCATCACCACCAGCACCCGAACC
TGGGCCCTGCCCACCTACAACAACCACCTCTACAAGCAAATCTCCAGCCAATCAGGAGCC
TCAAACGACAACCACTACTTTGGCTACAGCACCCCCTGGGGGTATTTTGACTTCAACAGA
TTCCACTGCCACTTTTCACCACGTGACTGGCAAAGACTCATCAACAACAACTGGGGATTC
CGACCCAAGAGACTCAACTTCAAGCTCTTTAACATTCAAGTCAAGGAGGTCACGCAGAAT
GACGGTACGACGACGATTGCCAATAACCTTACCAGCACGGTTCAGGTGTTTACTGACTCG
GAGTACCAGCTCCCGTACGTCCTCGGCTCGGCGCATCAAGGATGCCTCCCGCCGTTCCCA
GCAGACGTCTTCATGGTCCCACAGTATGGATACCTCACCCTGAACAACGGGAGTCAGGCG
GTAGGACGCTCTTCCTTTTACTGCCTGGAGTACTTTCCTTCTCAGATGCTGCGTACTGGA
AACAACTTTCAGTTCAGCTACACCTTTGAAGACGTTCCTTTCCACAGCAGCTACGCTCAC
AGCCAGAGTCTGGATCGGCTGATGAATCCTCTGATCGACCAGTACCTGTATTATCTGAAC
AAGACACAGTCAAATAGTGGAACTCTTCAGCAGTCTCGGCTACTGTTTAGTCAAGCTGGA
CCCACCAGCATGTCTCTTCAAGCTAAAAACTGGCTGCCTGGACCTTGCTACAGACAGCAG
CGTCTGTCAAAACAGGCAAACGACAACAACAACAGCAACTTTCCCTGGACTGCGGCTACA
AAGTATCATCTAAATGGCCGGGACTCGTTGGTTAATCCAGGGCCAGCTATGGCCAGCCAC
AAAGACGATGAAGAAAAGTTTTTCCCCATGCATGGAACCCTGATATTTGGTAAACAAGGA
ACAAATGCTAACGACGCGGATTTGGACAATGTCATGATTACAGATGAAGAAGAAATCCGC
ACCACCAATCCCGTGGCTACGGAGCAGTACGGATATGTGTCAAATAATTTGCAGAGCGGC
AACACACAAGCAGCTACTGGAACTGTCAATCACCAAGGAGCGTTACCTGGTATGGTGTGG
CAGGATCGAGACGTGTACCTGCAGGGACCCATTTGGGCCAAGATTCCTCACACCGATGGA
CACTTTCATCCTTCTCCACTGATGGGAGGTTTTGGGCTCAAACACCCGCCTCCTCAGATC
ATGATCAAAAACACTCCCGTTCCAGCCAATCCTCCCACAAACTTCAGTTCTGCCAAGTTT
GCTTCTTTCATCACACAGTATTCCACGGGGCAGGTCAGCGTGGAGATCGAGTGGGAGCTG
CAGAAGGAGAACAGCAAACGCTGGAATCCCGAAATTCAGTACACTTCCAACTACAACAAG
TCTGTTAATGTGGACTTTACTGTGGACACTAATGGCGTGTATTCAGAGCCTCGCCCCATT
GGCACCAGATACCTGACTCGTAATCTGTAATTGCTTGTTAATCAATAAACCGTTTAATTC
GTTTCAGTTGAACTTTGGTCTCTGTGTACTTCTTTCTTATCTAGTTTCCATGGCTACGTA
GATAAGTAGCATGGCGGGTTAATCATTAACTACAAGGAACCCCTAGTGATGGAGTTGGCC
ACTCCCTCTCTGCGCGCTCGCTCGCTCACTGAGGCCGGGCGACCAAAGGTCGCCCGACGC
CCGGGCTTTGCCCGGGCGGCCTCAGTGAGCGAGCGAGCGCGCAGAGAGGGAGTGGCCAA
SEQ ID NO: 101
>#668_AAV.FL.linear [organism = Adeno-associated virus][mol_type = genomic
DNA][isolation_source = liver tissue][topology = linear]
TTGGCCACTCCCTCTCTGCGCGCTCGCTCGCTCACTGAGGCCGGGCGACCAAAGGTCGCC
CGACTCCCGTGATCGCCCGGGCGGCCTCAGTGAGCGAGCGAGCGCGCAGAGAGGGAGTGG
CCAACTCCATCACTAGGGGTTCCTGGAGGGGTGGAGTCGTGACGTGAAGTACGTCATAGG
GTTAGGGAGGTCCTGTATTAGAGGTCACGTGAGTGTTTTGCGACATTTTGCGACACCATG
TGGTCACGCTGGGTATTTAAGCCCGAGTGAGCACGCAGGGTCTCCATTTTGAAGCGGGAG
GTTTGAACACGCAGCCGCCATGCCGGGGTTTTACGAGATTGTGATTAAGGTCCCCAGCGA
CCTTGACGAGCATTTGCCCGGCATTTCTGACAGCTTTGTGAACTGGGTGGCCGAGAAGGA
ATGGGAGTTGCCGCCAGATTCTGACATGGATCTGAATCTGATTGAGCAGGCACCCCTGAC
CGTGGCCGAGAAGCTGCAGCGCGACTTTCTGACGGAGTGGCGCCGTGTGAGTAAGGCCCC
GGAGGCCCTTTTCTTTGTGCAATTTGAGAAGGGAGAGAGCTACTTCCACATGCACGTTCT
GGTGGAGACTACCGGGGTAAAATCCATGGTTTTGGGACGTTTCCTGAGTCAGATTCGCGA
AAAACTGATTCAGAGAATTTACCGCGGGATCGAGCCGACTTTGCCAAACTGGTTCGCGGT
TACAAAGACCCGAAATGGCGCCGGAGGCGGGAACAAGGTGGTGGATGAGTGCTACATCCC
CAATTACCTGCTCCCCAAAACCCAGCCTGAGCTCCAGTGGGCGTGGACTAATATGGAACA
GTATTTAAGCGCCTGTTTGAATCTCGCGGAGCGTAAACGGTTGGTGGCGCAGCATCTGAC
GCACGTGTCGCAGACGCAGGAGCAGAACAAAGAGAATCAAAATCCCAATTCTGACGCGCC
GGTGATTAGATCAAAAACCTCAGCCAGGTACATGGAGCTGGTCGGGTGGCTCGTGGATAA
GGGGATTACGTCGGAGAAGCAGTGGATTCAGGAGGACCAGGCCTCATACATCTCCTTCAA
TGCGGCCTCCAACTCGCGGTCCCAAATCAAGGCTGCTCTGGACAATGCAGGAAAGATCAT
GAGCCTGACTAAAACCGCCCCCGACTACCTGGTGGGCCAGCAGCCCGTAGAGGACATTTC
CAGCAATCGGATTTATAAAATCTTGGAACTGAACGGGTACGATCCCCAATATGCGGCTTC
CGTCTTTCTGGGATGGGCCACGAAAAAGTTCGGCAAGAGGAACACCATCTGGCTGTTTGG
GCCTGCAACTACCGGGAAGACCAACATCGCGGAGGCCATAGCCCACACTGTGCCCTTCTA
CGGGTGCGTAAACTGGACCAATGAGAACTTTCCTTTCAACGACTGTGTCGACAAGATGGT
GATCTGGTGGGAGGAGGGAAAGATGACCGCCAAGGTCGTGGAGTCGGCCAAAGCCATTCT
CGGAGGAAGCAAGGTGCGCGTGGACCAGAAATGCAAGTCCTCGGCCCAGATAGACCCGAC
TCCCGTGATCGTCACCTCCAACACCAACATGTGCGCCGTGATTGACGGAAACTCAACGAC
CTTCGAACACCAGCAGCCGTTGCAAGACCGGATGTTCAAATTTGAACTCACCCGCCGTCT
GGATCATGACTTTGGGAAGGTCACCAAGCAGGAAGTCAAAGACTTTTTCCGGTGGGCAAA
GGATCACGTGGTTGAGGTGGAGCATGAATTCTACGTCAAAAAGGGTGGAGCCAAGAAAAG
ACCCGCCCCCAGTGACGCAGATATAAGTGAGCCCAAACGGGCGCGCGAGTCAGTTGCGCA
GCCATCGACGTCAGACGCGGAAGCTTCGATCAACTACGCGGACAGGTACCAAAACAAATG
TTCTCGTCACGTGGGCAAGAATCTGATGCTGTTTCCCTGCAGACAATGCGAGAGAATGAA
TCAAAATTCAAATATCTGCTTCACTCACGGACAGAAAGACTGTTTAGAGTGCTTTCCCGT
GTCAGAATCTCAACCCGTTTCTGTCGTCAAAAAGGCGTATCAGAAACTTTGCTACATTCA
TCACATAATGGGAAAGGTGCCAGACGCTTGCACTGCCTGCAATCTGGTCAATGTGGATTT
GGATGACTGCATCTCTGAACAATAAATGATTTAAATCAGGTATGGCTGCCGATGGTTATC
TTCCAGATTGGCTCGAGGACACTCTCTCTGAAGGAATAAGACAGTGGTGGAAGCTCAAAC
CTGGCCCACCGCCACCAAAGCCCGCAGAGCGGCATAAGGACGACAACAGGGGTCTTGTGC
TTCCTGGGTACAAGTACCTCGGACCCTTCAACGGACTCGACAAGGGAGAGCCGGTCAACG
AGGCAGACGCCGCGGCCCTCGAGCACGACAAGGCCTACGACCGGCAGCTCGACAGCGGAG
ACAACCCGTACCTCAAGTACAACCACGCCGACGCGGAGTTTCAGGAGCGCCTTAAAGAAG
ATACGTCTTTTGGGGGCAACCTCGGACGAGCAGTCTTCCAGGCGAAAAAGAGGGTTCTTG
AACCTCTGGGCCTGGTTGAGGAACCTGTTAAGACGGCTCCGGGAAAAAAGAGGCCGGTAG
AGCACTCTCCTGTGGAGCCAGACTCCTCCTCGGGAACCGGAAAAGCGGGCCAGCAGCCTG
CAAGAAAAAGATTGAATTTCGGTCAGACTGGAGACGCAGACTCCGTACCTGACCCCCAGC
CTCTCGGACAGCCACCAGCAGCCCCCTCTGGTCTGGGATCTACTACAATGGCTACAGGCA
GTGGCGCACCAATGGCAGACAATAACGAGGGTGCCGATGGAGTGGGTAATTCCTCAGGAA
ATTGGCATTGCGATTCCCAATGGCTGGGCGACAGAGTCATCACCACCAGCACCCGAACCT
GGGCCCTGCCCACCTACAACAACCACCTCTACAAGCAAATCTCCAGCCAATCAGGAGCCT
CAAACGACAACCACTACTTTGGCTACAGCACCCCCTGGGGGTATTTTGACTTCAACAGAT
TCCACTGCCACTTTTCACCACGTGACTGGCAAAGACTCATCAACAACAACTGGGGATTCC
GACCCAAGAGACTCAACTTCAAGCTCTTTAACATTCAAGTCAAAGAGGTCACGCAGAATG
ACGGTACGACGACGATTGCCAATAACCTTACCAGCACGGTTCAGGTGTTTACTGACTCGG
AGTACCAGCTCCCGTACGTCCTCGGCTCGGCGCACCAAGGATGCCTCCCGCCGTTCCCAG
CGGACGTCTTCATGGTCCCACAGTATGGATACCTCACCCTGAACAACGGGAGTCAGGCGG
TAGGACGCTCTTCCTTTTACTGCCTGGAGTACTTTCCTTCTCAGATGCTGCGTACTGGAA
ACAACTTTCAGTTCAGCTACACCTTTGAAGACGTTCCTTTCCACAGCAGCTACGCTCACA
GCCAGAGTCTGGATCGGCTGATGAATCCTCTGATCGACCAGTACCTGTATTATCTGAACA
AGACACAATCAAATAGTGGAACTCTTCAGCAGTCTCGGCTACTGTTTAGTCAAGCTGGAC
CCACCAGCATGTCTCTTCAAGCTAAAAACTGGCTGCCTGGACCTTGCTACAGACAGCAGC
GTCTGTCAAAGCAGGCAAACGACAACAACAACAGCAACTTTCCCTGGACTGCGGCTACAA
AGTATCATCTAAATGGCCGGGACTCGTTGGTTAATCCGGGCCCGGCTATGGCCAGCCACA
AAGACGATGAAGAAAAGTTTTTCCCCATGCATGGAACCCTGATATTTGGTAAACAAGGAA
CAAATGCTAACGACGCGGATTTGGACAATGTCATGATTACAGATGAAGAAGAAATCCGCA
CCACCAATCCCGTGGCTACGGAGCAGTACGGATATGTGTCAAATAATTTGCAAAACTCAA
ATACTGGTCCAACTACTGGAACTGTCAATCACCAAGGAGCGTTACCTGGTATGGTGTGGC
AGGATCGAGACGTGTACCTGCAGGGACCCATTTGGGCCAAGATTCCTCACACCGATGGAC
ACTTTCATCCTTCTCCACTGATGGGAGGTTTTGGGCTCAAACACCCGCCTCCTCAGATCA
TGATCAAAAACACTCCCGTTCCAGCCAATCCTCCCACAAACTTCAGTTCTGCCAAGTTTG
CTTCTTTCATCACACAGTATTCCACGGGGCAGGTCAGCGTGGAGATCGAGTGGGAGCTGC
AGAAAGAGAACAGCAAACGCTGGAACCCCGAGATCCAGTACACTTCCAACTATAACAAGT
CTGTTAATGTGGACTTTACTGTGGACACTAATGGTGTGTATTCAGAGCCTCGCCCCATTG
GCACCAGATACCTGACTCGTAATCTGTAATTGCTTGTTAATCAATAAACCGTTTAATTCG
TTTCAGTTGAACTTTGGTCTCTGTGTACTTCTTTTCTTATCTAGTTTCCATGGCTACGTA
GATAAGTAGCATGGCGGGTTAATCATTAACTCTAAGGAACCCCTAGTGATGGAGTTGGCC
ACTCCCTCTCTGCGCGCTCGCTCGCTCACTGAGGCCGGGCGACCAAAGGTCGCCCGACGC
CCGGGCTTTGCCCGGGCGGCCTCAGTGAGCGAGCGAGCGCGCAGAGAGGGAGTGGCCAA
SEQ ID NO: 102
>#367_AAV.FL.linear [organism = Adeno-associated virus][mol_type = genomic
DNA][isolation_source = liver tissue][topology = linear]
TTGGCCACTCCCTCTCTGCGCGCTCGCTCGCTCACTGAGGCCGGGCGACCAAAGGTCGCC
CGACGCCCGGGCTTTGCCCGGGCGGCCTCAGTGAGCGAGCGAGCGCGCAGAGAGGGAGTG
GCCAACTCCATCACTAGGGGTTCCTGGAGGGGTGGAGTCGTGACGTGAAGTACGTCATAG
GGTTAGGGAGGTCCTGTATTAGAGGTCACGTGAGTGTTTTGCGACATTTTGCGACACCAT
GTGGTCACGCTGGGTATTTAAGCCCGAGTGAGCACGCAGGGTCTCCATTTTGAAGCGGGA
GGTTTGAACGCGCAGCCGCCATGCCGGGGTTTTACGAGATTGTGATTAAGGTCCCCAGCG
ACCTTGACGAGCATTTGCCCGGCATTTCTGACAGCTTTGTGAACTGGGTGGCCGAGAAGG
AATGGGAGTTGCCGCCAGATTCTGACATGGATCTGAATCTGATTGAGCAGGCACCCCTGA
CCGTGGCCGAGAAGCTGCAGCGCGACTTTCTGACGGAGTGGCGCCGCGTGAGTAAGGCCC
CGGAGGCCCTCTTCTTTGTGCAATTTGAGAAGGGAGAGAGCTACTTCCACATGCATGTGC
TGGTGGAGACCACCGGGGTGAAATCCATGGTTTTGGGACGTTTCCTGAGTCAGATTCGCG
AAAAACTGATTCAGAGAATTTACCGCGGGATCGAGCCGACTTTGCCAAACTGGTTCGCGG
TCACAAAGACCCGAAATGGCGCCGGAGGCGGGAACAAGGTGGTGGATGAGTGCTACATCC
CCAATTACCTGCTCCCCAAAACCCAGCCTGAGCTCCAGTGGGCGTGGACTAATATGGAAC
AGTATTTAAGCGCCTGTTTGAATCTCGCGGAGCGTAAACGGTTGGTGGCGCAGCATCTGA
CGCACGTGTCGCAGACACAGGAGCAGAACAAAGAGAATCAGAATCCCAATTCTGACGCGC
CGGTGATTAGATCAAAAACCTCAGCCAGGTACATGGAGCTGGTCGGGTGGCTCGTGGATA
AGGGGATTACCTCGGAGAAGCAGTGGATCCAGGAGGACCAGGCTTCATACATCTCCTTCA
ATGCGGCCTCCAACTCGCGGTCCCAAATCAAGGCTGCTCTGGACAATGCGGGAAAGATTA
TGAGCCTGACTAAAACCGCCCCCGACTACCTGGTGGGCCAGCAGCCCGTGGAGGACATTT
CCAACAATCGAATTTATAAAATCTTGGAACTGAACGGGTACGATCCCCAATACGCTGCTT
CCGTCTTTCTGGGATGGGCCACGAAGAAGTTCGGCAAGAGGAACACCATCTGGCTGTTTG
GGCCTGCAACTACCGGAAAGACCAACATCGCGGAGGCCATAGCCCACACTGTGCCCTTCT
ACGGGTGCGTAAACTGGACCAATGAGAACTTTCCCTTCAACGACTGTGTCGACAAGATGG
TGATCTGGTGGGAGGAGGGAAAGATGACCGCCAAGGTCGTGGAGTCGGCCAAAGCCATTC
TCGGAGGAAGCAAGGTGCGCGTGGACCAGAAATGCAAGTCCTCGGCCCAGATAGACCCGA
CTCCCGTGATCGTCACCTCCAACACCAACATGTGCGCCGTGATTGACGGGAACTCAACGA
CCTTCGAACACCAGCAGCCGTTGCAAGACCGGATGTTCAAATTTGAACTCACCCGCCGTC
TGGATCATGACTTTGGGAAGGTCACCAAGCAGGAAGTCAAAGACTTTTTCCGGTGGGCAA
AGGATCACGTGGTTGAGGTGGAGCATGAATTCTACGTCAAAAAGGGTGGAGCCAAGAAAA
GACCCGCCCCCAGTGACGCAGATATAAGTGAGCCCAAACGGGCGCGCGAGTCAGTTGCGC
AGCCATCGACGTCAGACGCGGAAGCTTCGATCAACTACGCGGACAGGTACCAAAACAAAT
GTTCTCGTCACGTGGGCATGAATCTGATGCTGTTTCCCTGCAGACAATGCGAGAGAATGA
ATCAAAATTCAAATATCTGCTTCACTCACGGACAGAAAGACTGTTTAGAGTGCTTTCCCG
TGTCAGAATCTCAACCCGTTTCTGTCGTCAAAAAGGCGTATCAGAAACTGTGCTACATTC
ATCATATCATGGGAAAGGTGCCAGACGCTTGCACTGCCTGCGATCTGGTCAATGTGGATT
TGGATGACTGCATCTCTGAACAATAAATGATTTAAATCAGGTATGGCTGCCGATGGTTAT
CTTCCAGATTGGCTCGAGGACACTCTCTCTGAAGGAATAAGACAGTGGTGGAAGCTCAAA
CCTGGCCCACCACCACCAAAGCCCGCAGAGCGGCATAAGGACGACAGCAGGGGTCTTGTG
CTTCCTGGGTACAAGTACCTCGGACCCTTCAACGGACTCGACAAGGGAGAGCCGGTCAAC
GAGGCAGACGCCGCGGCCCTCGAGCACGACAAGGCCTACGACCGGCAGCTCGACAGCGGA
GACAACCCGTACCTCAAGTACAACCACGCCGACGCGGAGTTTCAGGAGCGCCTTAAAGAA
GATACGTCTTTTGGGGGCAACCTCGGACGAGCAGTCTTCCAGGCGAAAAAGAGGGTTCTT
GAACCTCTGGGCCTGGTTGAGGAACCTGTTAAGACGGCTCCGGGAAAAAAGAGGCCGGTA
GAGCACTCTCCTGTGGAGCCAGACTCCTCCTCGGGAACCGGAAAAGCGGGCCAGCAGCCT
GCAAGAAAAAGATTGAATTTTGGTCAGACTGGAGACGCAGACTCCGTACCTGACCCCCAG
CCTCTCGGACAGCCACCAGCAGCCCCCTCTGGTTTGGGATCTACTACAATGGCTACAGGC
AGTGGCGCACCAGTGGCAGACAATAACGAGGGTGCCGATGGAGTGGGTAATTCCTCAGGA
AATTGGCATTGCGATTCCCAATGGCTGGGCGACAGAGTCATCACCACCAGCACCCGAACC
TGGGCCCTGCCCACCTACAACAACCACCTCTACAAGCAAATCTCCAGCCAATCAGGAGCC
TCAAACGACAACCACTACTTTGGCTACAGCACCCCCTGGGGGTATTTTGACTTCAACAGA
TTCCACTGCCACTTTTCACCACGTGATTGGCAAAGACTCATCAACAACAACTGGGGATTC
CGACCCAAGAGACTCAACTTCAAGCTCTTTAACATTCAAGTCAAAGAGGTCACGCAGAAT
GACGGTACGACGACGATTGCCAATAACCTTACCAGCACGGTTCAGGTGTTTACTGACTCG
GAGTACCAGCTCCCGTACGTCCTCGGCTCGGCGCACCAAGGATGCCTCCCGCCGTTCCCA
GCGGACGTCTTCATGGTCCCACAGTATGGATACCTCACCCTGAACAACGGGAGTCAGGCG
GTAGGACGCTCTTCCTTTTACTGCCTGGAGTACTTTCCTTCTCAGATGCTGCGTACTGGA
AACAACTTTCAGTTCAGCTACACCTTTGAAGACGTTCCTTTCCACAGCAGCTACGCTCAC
AGCCAGAGTCTGGATCGGCTGATGAATCCTCTGATCGACCAGTACCTGTATTATCTGAAC
AAAACACAATCAAATAGTGGAACTCTTCAGCAGTCTCGGCTACTGTTTAGTCAAGCTGGA
CCCACCAGCATGTCTCTTCAAGCTAAAAACTGGCTGCCTGGACCTTGCTACAGACAGCAG
CGTCTGTCAAAGCAGGCAAACGACAACAACAACAGCAACTTTCCCTGGACTGCGGCTACA
AAGTATCATCTAAATGGCCGGGACTCGTTGGTTAATCCAGGACCAGCTATGGCCAGCCAC
AAAGACGATGAAGAAAAGTTTTTCCCCATGCATGGAACCCTGATATTTGGTAAACAAGGA
ACAAATGCTAACGACGCAGATTTGGACAATGTCATGATTACAGATGAAGAAGAAATCCGC
ACCACCAATCCCGTGGCTACGGAGCAGTACGGATATGTGTCAAATAATTTGCAAAACTCA
AATACTGGTCCAACTACTGGAACTGTCAATCACCAAGGAGCGTTACCTGGTATGGTGTGG
CAGGATCGAGACGTGTACCTGCAGGGACCCATTTGGGCCAAGATTCCTCACACCGATGGA
CACTTTCATCCTTCTCCACTGATGGGAGGTTTTGGGCTCAAACACCCGCCTCCTCAGATC
ATGATCAAAAACACTCCCGTTCCAGCCAATCCTCCTACAAACTTCAGTTCTGCCAAGTTT
GCTTCTTTCATCACACAGTACTCCACGGGGCAGGTCAGCGTGGAGATCGAGTGGGAGCTG
CAGAAGGAGAACAGCAAACGCTGGAATCCCGAGATTCAGTACACTTCAAACTACAACAAG
TCTGTTAATGTGGACTTTACTGTGGACACTAATGGCGTGTATTCAGAGCCTCGCCCCATT
GGCACCAGATACCTGACTCGTAATCTGTAATTGCTTGTTAATCAATAAACCGTTTAATTC
GTTTCAGTTGAACTTTGGTCTCCGCGTACTTCTTTTCTTATCTAGTTTCCATGGCTACGT
AGATAAGTAGCATGGCGGGTTAATCATTAACTACAAGGAACCCCTAGTGATGGAGTTGGC
CACTCCCTCTCTGCGCGCTCGCTCGCTCACTGAGGCCGGGCGACCAAAGCTCGCCCGACG
CCCGGGCTTTGCCCGGGCGGCCTCAGTGAGCGAGCGAGCGCGCAGAGAGGGAGTGGCCAA
SEQ ID NO: 103
>#1020_AAV.FL.linear [organism = Adeno-associated virus][mol_type = genomic
DNA][isolation_source = liver tissue][topology = linear]
TTGGCCACTCCCTCTCTGCGCGCTCGCTCGCTCACTGAGGCCGGGCGACCAAAGGTCGCC
CGACGCCCGGGCTTTGCCCGGGCGGCCTCAGTGAGCGAGCGAGCGCGCAGAGAGGGAGTG
GCCAACTCCATCACTAGGGGTTCCTGGAGGGGTGGAGTCGTGACGTAAATTACGTCATAG
GGTTAGGGAGGTCCTGTATTAGAGGTCACGTGAGTGTTTTGCGACATTTTGCGACACCAT
GTGGTCACGCTGGGTATTTAAGCCCGAGTGAGCACGCAGGGTCTCCATTTTGAAGCGGGA
GTTTTGAACGCGCAGCCGCCATGCCGGGGTTTTACGAGATTGTGATTAAGGTCCCCAGCG
ACCTTGACGAGCATCTGCCGGGCATTTCTGACAGCTTTGTGAACTGGGTGGCCGAGAAGG
AATGGGAGTTGCCGCCAGATTCTGACATGGATTTGAATCTGATTGAGCAGGCACCCCTGA
CCGTGGCCGAGAAGCTGCAGCGCGACTTTCTGACGGAGTGGCGCCGTGTGAGTAAGGCCC
CGGAGGCCCTCTTCTTTGTACAATTTGAGAAGGGAGAGAGCTATTTCCACATGCACGTGC
TCGTGGAAACCACCGGGGTGAAATCCATGGTTTTGGGACGTTTCCTGAGTCAGATTCGTG
AAAAACTGATTCAGAGAATTTACCGCGGGATCGAGCCGACTTTGCCAAACTGGTTCGCGG
TCACAAAGACCAGAAATGGCGCCGGAGGCGGGAACAAGGTGGTGGATGAGTGCTACATCC
CCAATTACCTGCTCCCCAAAACCCAGCCTGAGCTCCAGTGGGCGTGGACTAATATGGAAC
AGTATTTAAGCGCCTGTTTAAATCTCTCGGAGCGTAAACGGTTGGTGGCGCAGCATCTGA
CGCACGTGTCGCAGACGCAGGAGCAGAACAAAGAGAATCAGAATCCCAATTCTGACGCGC
CGGTGATCAGATCAAAAACCTCAGCCAGGTACATGGAGCTGGTCGGGTGGCTCGTGGACA
AGGGGATTACCTCGGAGAAGCAGTGGATCCAGGAGGACCAGGCCTCATACATCTCCTTCA
ATGCGGCCTCCAACTCGCGGTCCCAAATCAAGGCTGCTCTGGACAATGCGGGAAAGATCA
TGAGCCTCACTAAAACTGCCCCCGACTACCTGGTGGGCCAGCAGCCCGTGGAGGACATTT
CCAGCAATCGGATTTATAAAATCTTGGAACTGAACGGGTACGATCCCCAATACGCGGCTT
CCGTCTTTCTGGGATGGGCCACGAAAAAGTTCGGCAAGAGGAACACCATCTGGCTGTTTG
GGCCTGCAACTACCGGGAAGACCAACATCGCGGAGGCCATAGCCCACACTGTGCCCTTCT
ACGGGTGCGTAAACTGGACCAATGAGAACTTTCCCTTCAACGACTGTGTCGACAAGATGG
TGATCTGGTGGGAGGAAGGAAAGATGACTGCCAAGGTCGTGGAGTCGGCCAAAGCCATTC
TTGGCGGAAGCAAGGTGCGCGTGGACCAGAAATGCAAGTCCTCGGCCCAGATAGACCCGA
CTCCCGTGATCGTCACCTCCAACACCAACATGTGCGCCGTGATTGACGGGAACTCAACGA
CCTTCGAGCACCAGCAGCCGTTGCAAGATCGGATGTTCAAATTTGAACTCACCCGCCGTC
TGGATCATGACTTTGGGAAGGTCACCAAGCAGGAAGTCAAAGACTTTTTCCGGTGGGCAA
AGGATCACGTGGTTGAGGTGGAGCATGAATTCTACGTCAAAAAGGGTGGAGCCAAAAAAA
GACCCGCCCCCAGTGACGCAGATATAAGTGAGCCCAAACGGGCGCGCGAGTCAGTTGCGC
AGCCATCGACGTCAGACGCGGAAGCTTCGATCAACTACGCGGACAGGTACCAAAACAAAT
GTTCTCGTCACGTGGGCATGAATCTGATGCTGTTTCCCTGCAGACAATGCGAGAGAATGA
ATCAGAATTCAAATATTTGCTTCACTCACGGACAGAAAGACTGTTTAGAGTGCTTTCCCG
TGTCAGAATCTCAACCCGTTTCTGTCGTCAAAAAGGCGTATCAGAAACTGTGCTACATTC
ATCATATCATGGGAAAGGTACCAGACGCTTGCACTGCCTGCGATCTGGTCAATGTGGATT
TGGATGACTGCATCTCTGAACAATAAATGATTTAAATCAGGTATGGCTGCCGATGGTTAT
CTTCCAGATTGGCTCGAGGACACTCTCTCTGAAGGAATAAGACAGTGGTGGAAGCTCAAA
CCTGGCCCACCACCACCAAAGCCCGCAGAGCGGCATAAGGACGACAGCAGGGGTCTTGTG
CTTCCTGGGTACAAGTACCTCGGACCCTTCAACGGACTCGACAAGGGAGAGCCGGTCAAC
GAGGCAGACGCCGCGGCCCTCGAGCACGACAAGGCCTACGACCGGCAGCTCGACAGCGGA
GACAACCCGTACCTCAAGTACAACCACGCCGACGCGGAGTTTCAGGAGCGTCTTAAAGAA
GATACGTCTTTTGGGGGCAACCTCGGACGAGCAGTCTTCCAGGCGAAAAAGAGGGTTCTT
GAACCTCTGGGCCTGGTTGAGGAACCTGTTAAGACGGCTCCGGGAAAAAAGAGGCCGGTA
GAGCACTCTCCTGTGGAGCCAGACTCCTCCTCGGGAACCGGAAAAGCGGGCCAGCAGCCT
GCAAGAAAAAGATTGAATTTTGGTCAGACTGGAGACGCAGACTCCGTACCTGACCCCCAG
CCTCTCGGACAGCCACCAGCAGCCCCCTCTGGTCTGGGATCTACTACAATGGCTACAGGC
AGTGGCGCACCAATGGCAGACAATAACGAGGGTGCCGATGGAGTGGGTAATTCCTCAGGA
AATTGGCATTGCGATTCCCAATGGCTGGGCGACAGAGTCATCACCACCAGCACCCGAACC
TGGGCCCTGCCCACCTACAACAACCACCTCTACAAGCAAATCTCCAGCCAATCAGGAGCC
TCAAACGACAACCACTACTTTGGCTACAGCACCCCCTGGGGGTATTTTGACTTCAACAGA
TTCCACTGCCACTTTTCACCACGTGATTGGCAAAGACTCATCAACAACAACTGGGGATTC
CGACCCAAGAGACTCAACTTCAAGCTCTTTAACATTCAAGTCAAAGAGGTCACGCAGAAT
GACGGTACGACGACGATTGCCAATAACCTTACCAGCACGGTTCAGGTGTTTACTGACTCG
GAGTACCAGCTCCCGTACGTCCTCGGCTCGGCGCACCAAGGATGCCTCCCGCCGTTCCCA
GCGGACGTCTTCATGGTCCCACAGTATGGATACCTCACCCTGAACAACGGGAGTCAGGCG
GTAGGACGCTCTTCCTTTTACTGCCTGGAGTACTTTCCTTCTCAGATGCTTCGTACTGGA
AACAACTTTCAGTTCAGCTACACCTTTGAAGACGTTCCTTTCCACAGCAGCTACGCTCAC
AGCCAGAGTCTGGATCGGCTGATGAATCCTCTGATCGACCAGTACCTGTATTATCTGAAC
AAAACACAATCAAATAGTGGAACTCTTCAGCAGTCTCGGCTACTGTTTAGTCAAGCTGGA
CCCACCAGCATGTCTCTTCAAGCTAAAAACTGGCTACCTGGACCTTGCTACAGACAGCAG
CGTCTGTCAAAGCAGGCAAACGACAACAACAACAGCAACTTTCCCTGGACTGCAGCTACA
AAGTATCATCTAAATGGCCGGGACTCGTTGGTTAATCCAGGACCAGCTATGGCCAGTCAC
AAGGATGACGAAGAAAAGTTTTTCCCCATGCATGGAACCCTGATATTTGGTAAACAAGGA
ACAAATGCCAACGACGCGGATTTGGAAAATGTCATGATTACAGACGAAGAAGAAATCAGG
ACCACCAATCCCGTGGCTACGGAGCAGTATGGGACTGTGTCAAATAATTTGCAAAACTCA
AACACTGGTCCAACTACTGGAACTGTCAATCACCAAGGAGCGTTACCTGGTATGGTGTGG
CAGGATCGAGACGTGTACCTGCAGGGACCCATTTGGGCCAAGATTCCTCACACCGATGGA
CACTTTCATCCTTCTCCACTGATGGGAGGTTTTGGGCTCAAACACCCGCCTCCTCAGATC
ATGATCAAAAACACTCCCGTTCCAGCCAATCCTCCTACAAACTTCAGTTCTGCCAAGTTT
GCTTCTTTCATCACACAGTACTCCACGGGGCAGGTCAGCGTGGAGATCGAGTGGGAGCTG
CAGAAGGAGAACAGCAAACGCTGGAATCCCGAGATTCAGTACACTTCCAACTACAACAAA
TCTGTTAATGTGGACTTTACTGTGGACACTAATGGTGTGTATTCAGAGCCTCGCCCCATT
GGCACCAGATACCTGACTCGTAATCTGTAATTGCTTGTTAATCAATAAACCGTGTAATTC
GTTTCAGTTGAACTTTGGTCTATGCGTACTTCTTTTCTTATCTGGTTTCCATGGCTACGT
AGATAAGTAGCATGGCGGGCTAATCATTAACTCTAAGGAACCCCTAGTGATGGAGTTGGC
CACTCCCTCTCTGCGCGCTCGCTCGCTCACTGAGGCCGGGCGACCAAAGGTCGCCCGACG
CCCGGGCTTTGCCCGGGCGGCCTCAGTGAGCGAGCGAGCGCGCAGAGAGGGAGTGGCCAA
SEQ ID NO: 104
>#1158_AAV.FL.linear [organism = Adeno-associated virus][mol_type = genomic
DNA][isolation_source = liver tissue][topology = linear]
TTGGCCACTCCCTCTCTGCGCGCTCGCTCGCTCACTGAGGCCGGGCGACCAAAGGTCGCC
CGACGCCCGGGCTTTGCCCGGGCGGCCTCAGTGAGCGAGCGAGCGCGCAGAGAGGGAGTG
GCCAACTCCATCACTAGGGGTTCCTGGAGGGGTGGAGTCGTGACGTGAATTACGTCATAG
GGTTAGGGAGGTCCTGTATTAGAGGTCACGTGAGTGTTTTGCGACATTTTGCGACACCAT
GTGGTTACGCTGGGTATTTAAGCCCGAGTGAGCACGCAGGGTCTCCATTTTGAAGCGGGA
GGTTTGAACGCGCAGTCGCCATGCCGGGGTTTTACGAGATTGTGATTAAGGTCCCCAGCG
ACCTTGACGAGCATCTGCCCGGCATTTCTGACAGCTTTGTGAACTGGGTGGCCGAAAAGG
AATGGGAGTTGCCGCCAGATTCTGACATGGATCTGAATCTGATTGAGCAGGCACCCCTGA
CCGTGGCCGAGAAGCTGCAGCGCGACTTTCTGACGGAGTGGCGCCGCGTGAGTAAGGCCC
CGGAGGCCCTCTTCTTTGTGCAATTTGAGAAGGGAGAGAGCTATTTCCACATGCACGTGC
TGGTGGAGACCACCGGGGTGAAATCCATGGTTTTGGGACGTTTCCTGAGTCAGATTCGCG
AAAAACTGATTCAGAGAATTTACCGCGGGATTGAGCCGACTTTGCCAAACTGGTTCGCGG
TCACAAAGACCCGAAATGGCGCCGGAGGCGGGAACAAGGTGGTGGATGAGTGCTACATCC
CCAATTACCTGCTCCCCAAAACCCAGCCTGAGCTCCAGTGGGCGTGGACTAATATGGAAC
AGTATTTAAGCGCCTGTTTGAATCTCGCGGAGCGTAAACGGTTGGTGGCGCAGCATCTGA
CGCACGTGTCGCAGACGCAGGAGCAGAACAAAGAGAATCAGAATCCCAATTCTGACGCGC
CGGTGATTAGATCAAAAACCTCAGCCAGGTACATGGAGCTGGTCGGGTGGCTCGTGGATA
AGGGGATTACCTCGGAGAAGCAGTGGATCCAGGAGGACCAGGCCTCATACATCTCCTTTA
ATGCGGCCTCCAACTCGCGGTCCCAGATCAAGGCTGCTCTGGACAATGCGGGAAAGATCA
TGAGCCTCACTAAAACGGCCCCCGACTACCTGGTGGGCCAGCAGCCCGTGGAGGACATTT
CCAGCAATAGGATTTATAAAATCTTGGAACTGAACGGGTACGATCCCCAATACGCGGCTT
CCGTCTTTCTGGGATGGGCCACGAAAAAGTTCGGCAAGAGAAACACCATCTGGCTGTTTG
GGCCTGCAACTACCGGGAAGACCAACATCGCGGAAGCCATAGCCCACACTGTGCCCTTCT
ACGGGTGCGTAAACTGGACCAATGAGAACTTTCCCTTCAACGACTGTGTCGACAAGATGG
TGATCTGGTGGGAGGAGGGGAAGATGACCGCCAAGGTCGTGGAGTCGGCCAAAGCCATTC
TCGGTGGAAGCAAGGTGCGCGTGGACCAGAAATGCAAGTCCTCGGCCCAGATAGACCCGA
CTCCCGTGATCGTCACCTCCAACACCAACATGTGCGCCGTGATTGACGGGAACTCAACGA
CCTTCGAACACCAGCAGCCGTTGCAAGACCGGATGTTCAAATTTGAACTCACCCGCCGTC
TAGATCATGACTTTGGGAAGGTTACCAAGCAGGAAGTCAAAGACTTTTTCCGGTGGGCAA
AGGATCACGTGGTTGAGGTGGAGCATGAATTCTACGTCAAAAAGGGTGGAGCCAAGAAAA
GACCCGCCCCCAGTGACGCAGATATAAGTGAGCCCAAACGAGCGCGCGAGTCAGTTGCGC
AGCCATCGACGTCAGACGCGGAAGCTTCAATCAACTACGCGGACAGGTACCAAAACAAAT
GTTCTCGTCACGTGGGCATGAATCTGATGCTGTTTCCCTGCAGACAATGCGAGAGAATGA
ATCAGAATTCAAATATCTGCTTCACTCATGGACAGAAAGACTGTTTAGAGTGCTTTCCCG
TGTCAGAATCTCAACCCGTTTCTGTCGTCAAAAAGGCGTATCAGAAACTTTGCTACATTC
ATCATATCATGGGAAAGGTGCCAGACGCTTGCACTGCCTGCGATCTGGTCAATGTGGATT
TGGATGACTGCATCTCTGAACAATAAATGATTTAAATCAGGTATGGCTGCCGATGGTTAT
CTTCCAGATTGGCTCGAGGACACTCTCTCTGAAGGAATAAGACAGTGGTGGAAGCTCAAA
CCTGGCCCACCACCACCAAAGCCCGCAGAGCGGCATAAGGACGACAGCAGGGGTCTTGTG
CTTCCTGGGTACAAGTACCTCGGACCCTTCAACGGACTCGACAAGGGAGAGCCGGTCAAC
GAGGCAGACGCCGCGGCCCTCGAGCACGACAAGGCCTACGACCGGCAGCTCGACAGCGGA
GACAACCCGTACCTCAAGTACAACCACGCCGACGCGGAGTTTCAGGAGCGCCTTAAAGAA
GATACGTCTTTTGGGGGCAACCTCGGACGAGCAGTCTTCCAGGCGAAAAAGAGGGTTCTT
GAACCTCTGGGCCTGGTTGAGGAACCTGTTAAGACGGCTCCGGGAAAAAAGAGGCCGGTA
GAGCACTCTCCTGTGGAGCCAGACTCCTCCTCGGGAACCGGAAAAGCGGGCCAGCAGCCT
GCAAGAAAAAGACTGAATTTCGGTCAGACTGGAGACGCAGACTCCGTACCTGACCCCCAG
CCTCTCGGAAAGCCACCAGCAGCCCCCTCTGGTCTGGGATCTACTACAATGGCTACAGGC
AGTGGCGCACCAATGGCAGACAATAACGAGGGCGCCGATGGAGTGGGTAATTCCTCAGGA
AATTGGCATTGCGATTCCCAATGGCTGGGCGACAGAGTCATCACCACCAGCACCCGAACC
TGGGCCCTGCCCACCTACAACAACCACCTCTACAAGCAAATCTCCAGCCAATCAGGAGCC
TCAAACGACAACCACTACTTTGGCTACAGCACCCCCTGGGGGTATTTTGACTTCAACAGA
TTCCACTGCCACTTTTCACCACGTGACTGGCAAAGACTCATCAACAACAACTGGGGATTC
CGACCCAAGAGACTCAACTTCAAGCTCTTTAACATTCAAGTCAAAGAGGTCACGCAGAAT
GACGGTACGACGACGATTGCCAATAACCTTACCAGCACGGTTCAGGTGTTTACTGACTCG
GAGTACCAGCTCCCGTACGTCCTCGGCTCGGCGCATCAAGGATGCCTCCCGCCGTTTCCA
GCGGACGTCTTCATGGTCCCACAGTATGGATACCTCACCCTGAACAACGGGAGTCAGGCG
GTAGGACGCTCTTCCTTTTACTGCCTGGAGTACTTTCCTTCTCAGATGCTGCGTACTGGA
AACAACTTTCAGTTCAGCTACACCTTTGAAGACGTTCCTTTCCACAGCAGCTACGCTCAC
AGCCAGAGTCTGGATCGGCTGATGAATCCTCTGATCGACCAGTACCTGTATTATCTGAAC
AAGACACAATCAAATAGTGGAACTCTTCAGCAGTCTCGGCTACTGTTTAGTCAAGCTGGA
CCCACCAGCATGTCTCTTCAAGCTAAAAACTGGCTGCCTGGACCTTGCTACAGACAGCAG
CGTCTGTCAAAGCAGGCAAACGACAACAACAACAGCAACTTTCCCTGGACTGCGGCTACA
AAGTATCATCTAAATGGCCGGGACTCGTTGGTTAATCCAGGACCAGCTATGGCCAGCCAC
AAAGACGATGAAGAAAAGTTTTTCCCCATGCATGGAACCCTGATATTTGGTAAACAAGGA
ACAAATGCTAACGACGCGGATTTGGACAATGTCATGATTACAGATGAAGAAGAAATCCGC
ACCACCAATCCCGTAGCTACGGAGCAGTACGGATATGTGTCAAATAATTTGCAAAACTCA
AATACTGGTCCAACTACTGGAACTGTCAATCACCAAGGAGCGTTACCTGGTATGGTGTGG
CAGGATCGAGACGTGTACCTGCAGGGACCCATTTGGGCCAAGATTCCTCACACCGATGGA
CACTTTCATCCTTCTCCACTGATGGGAGGTTTTGGGCTCAAACACCCGCCTCCTCAGATC
ATGATCAAAAACACTCCCGTTCCAGCCAATCCTCCTACAAACTTCAGTTCTTCCAAGTTT
GCTTCTTTCATCACACAGTATTCCACGGGGCAGGTCAGCGTGGAGATCGAGTGGGAGCTG
CAGAAGGAGAACAGCAAACGCTGGAATCCCGAAATTCAGTATACTTCCAACTACAACAAA
TCTGTTAATGTGGACTTTACTGTGGACACTAATGGTGTGTATTCAGAGCCTCGCCCCATT
GGCACCAGATACCTGACTCGTAATCTGTAATTGCTTGTTAATCAATAAACCGTGTAATTC
GTTTCAGTTGAACTTTGGTCTTTGCGTACTTCTTTCTTATCTAGTTTCCATGGCTACGTA
GATAAGTAGCATGGAGGGTTAATCATTAACTACAAGGAACCCCTAGTGATGGAGTTGGCC
ACTCCCTCTCTGCGCGCTCGCTCGCTCACTGAGGCCGGGCGACCAAAGGTCGCCCGACGC
CCGGGCTTTGCCCGGGCGGCCTCAGTGAGCGAGCGAGCGCGCAGAGAGGGAGTGGCCAA
SEQ ID NO: 105
>#2107_AAV.FL.linear [organism = Adeno-associated virus][mol_type = genomic
DNA][isolation_source = liver tissue][topology = linear]
TTGGCCACTCCCTCTCTGCGCGCTCGCTCGCTCACTGAGGCCGGGCGACCAAAGGTCGCC
CGACGCCCGGGCTTTGCCCGGGCGGCCTCAGTGAGCGAGCGAGCGCGCAGAGAGGGAGTG
GCCAACTCCATCACTAGGGGTTCCTGGAGGGGTGGAGTCGTGACGTGAATTACGTCATAG
GGTTAGGGAGGTCCTGTATTAGAGGTCACGTGAGTGTTTTGCGACATTTTGCGACACCAT
GTGGTCACGCTGGGTATTTAAGCCCGAGTGAGCACGCAGGGTCTCCATTTTGAAGCGGGA
GGTTTGAACGCGCAGCCGCCATGCCGGGATTTTACGAGATTGTGATTAAGGTCCCCAGCG
ACCTTGACGAGCATCTGCCCGGCATTTCTGACAGCTTTGTGAACTGGGTGGCCGAGAAGG
AATGGGAGTTGCCGCCAGATTCTGACATGGATCTGAATCTGATTGAGCAGGCACCCCTGA
CCGTGGCCGAAAAGCTGCAGCGTGACTTTCTGACGGAGTGGCGCCGCGTGAGTAAGGCCC
CGGAGGCCCTCTTCTTTGTGCAATTTGAGAAGGGAGAGAGTTACTTCCACATGCACATGC
TGGTGGAGACCACCGGGGTGAAATCCATGGTTTTGGGACGTTTCCTGAGTCAGATTCGCG
AAAAACTGATTCAGAGAATTTACCGCGGGATCGAGCCGACTTTGCCAAACTGGTTCGCGG
TCACAAAGACCCGAAATGGCGCCGGAGGCGGGAACAAGGTGGTGGATGAGTGCTACATCC
CCAATTACCTGCTCCCCAAAACCCAGCCTGAGCTCCAGTGGGCGTGGACTAATATGGAAC
AGTATTTAAGCGCCTGTTTGAATCTCGCGGAGCGTAAACGGTTGGTGGCGCAGCATCTGA
CGCACGTGTCGCAGACGCAGGAGCAGAACAAAGAGAATCAGAATCCCAATTCTGACGCGC
CGGTGATTAGATCAAAAACATCAGCCAGGTACATGGAGCTGGTCGGGTGGCTCGTGGATA
AGGGGATTACCTCGGAGAAGCAGTGGATCCAGGAGGACCAGGCTTCATACATCTCCTTCA
ATGCGGCCTCCAACTCGCGGTCCCAAATCAAGGCTGCTCTTGACAATGCGGGAAAGATCA
TGAGCCTGACTAAAACCGCCCCCGACTACCTGGTGGGCCAGCAGCCCGTGGAGGACATTT
CCAGCAATCGGATTTATAAAATCTTGGAACTGAACGGGTACGATCCCCAATACGCGGCTT
CCGTCTTTCTGGGATGGGCCACGAAAAAGTTCGGCAAGAGGAACACCATCTGGCTGTTTG
GGCCTGCAACCACCGGGAAGACCAACATCGCGGAGGCCATAGCCCACACTGTGCCCTTCT
ACGGGTGCGTAAACTGGACCAATGAGAACTTTCCCTTCAACGACTGCGTCGACAAGATGG
TGATCTGGTGGGAGGAGGGAAAGATGACTGCCAAGGTCGTGGAGTCTGCCAAAGCCATTC
TCGGAGGAAGCAAGGTGCGCGTGGACCAGAAATGCAAGTCCTCGGCCCAGATAGACCCGA
CTCCCGTGATCGTCACCTCCAACACCAACATGTGCGCCGTGATTGACGGGAACTCAACGA
CCTTCGAACATCAGCAGCCGTTGCAAGACCGGATGTTCAAATTTGAACTCACCCGCCGTC
TGGATCATGACTTTGGGAAGGTCACCAAGCAGGAAGTCAAAGACTTTTTCCGGTGGGCAA
AGGATCACGTGGTTGAGGTGGAGCATGAATTCTACGTCAAAAAGGGTGGAGCCAAAAAAA
GACCCGCCCCCAGTGACGCAGATATAAGTGAGCCCAAACGGGTGCGCGAGTCAGTTGCGC
AGCCATCGACGTCAGACGCGGAAGCTTCGATCAACTACGCGGACAGGTACCAAAACAAAT
GTTCTCGTCACGTGGGCATGAATCTGATGCTGTTTCCCTGCAGACAATGCGAGAGAATGA
ATCAGAATTCAAATATCTGCTTCACTCACGGACAGAAAGACTGTTTAGAGTGCTTTCCCG
TGTCAGAATCTCAACCCGTTTCTGTCGTCAAAAAGGCGTATCAGAAACTGTGCTACATTC
ATCATATTATGGGAAAGGTGCCAGACGCTTGCACTGCCTGCGATCTGGTCAATGTGGATT
TGGATGACTGCATCTCTGAACAATAAATGATTTAAATCAGGTATGGCTGCCGATGGTTAT
CTTCCAGATTGGCTCGAGGACACTCTCTCTGAAGGAATAAGACAGTGGTGGAAGCTCAAA
CCTGGCCCACCACCACCAAAGCCCGCAGAGCGGCATAAGGACGACAGCAGGGGTCTTGTG
CTTCCTGGGTACAAGTACCTCGGACCCTTCAACGGACTCGACAAGGGAGAGCCGGTCAAC
GAGGCAGACGCCGCGGCCCTCGAGCACGACAAGGCCTACGACCGGCAGCTCGACAGCGGA
GACAACCCGTACCTCAAGTACAACCACGCCGACGCGGAGTTTCAGGAGCGCCTTAAAGAA
GATACGTCTTTTGGGGGCAACCTCGGACGAGCAGTCTTCCAGGCGAAAAAGAGGGTTCTT
GAACCTCTGGGCCTGGTTGAGGAACCTGTTAAGACGGCTCCGGGAAAAAAGAGGCCGGTA
GAGCACTCTCCTGTGGAGCCAGACTCCTCCTCGGGAACCGGAAAAGCGGGCCAGCAGCCT
GCAAGAAAAAGATTGAATTTTGGTCAGACTGGAGACGCAGACTCCGTACCTGACCCCCAG
CCTCTCGGACAGCCACCAGCAGCCCCCTCTGGTTTGGGATCTACTACAATGGCTACAGGC
AGTGGCGCACCAGTGGCAGACAATAACGAGGGTGCCGATGGAGTGGGTAATTCCTCAGGA
AATTGGCATTGCGATTCCCAATGGCTGGGCGACAGAGTCATCACCACCAGCACCCGAACC
TGGGCCCTGCCCACCTACAACAACCACCTCTACAAGCAAATCTCCAGCCAATCAGGAGCC
TCAAACGACAACCACTACTTTGGCTACAGCACCCCTTGGGGGTATTTTGACTTCAACAGA
TTCCACTGCCACTTTTCACCACGTGACTGGCAAAGACTCATCAACAACAACTGGGGATTC
CGACCCAAGAGACTCAACTTCAAGCTCTTTAACATTCAAGTCAAAGAGGTCACGCAGAAT
GACGGTACGACGACGATTGCCAATAACCTTACCAGCACGGTTCAGGTGTTTACTGACTCG
GAGTACCAGCTCCCGTACGTCCTCGGCTCGGCGCATCAAGGATGCCTCCCGCCGTTTCCA
GCGGACGTCTTCATGGTCCCACAGTATGGATACCTCACCCTGAACAACGGGAGTCAGGCG
GTAGGACGCTCTTCCTTTTACTGCCTGGAGTACTTTCCTTCTCAGATGCTGCGTACTGGA
AACAACTTTCAGTTCAGCTACACCTTTGAAGACGTTCCTTTCCACAGCAGCTACGCTCAC
AGCCAGAGTCTGGATCGGCTGATGAATCCTCTGATCGACCAGTACCTGTATTATCTGAAC
AAAACACAATCAAATAGTGGAACTCTTCAGCAGTCTCGGCTACTGTTTAGTCAAGCTGGA
CCCACCAGCATGTCTCTTCAAGCTAAAAACTGGCTGCCTGGACCTTGCTACAGACAGCAG
CGTCTGTCAAAGCAGGCAAACGACAACAACAACAGCAACTTTCCCTGGACTGCAGCTACA
AAGTATCATCTAAATGGCCGGGACTCGTTGGTTAATCCAGGACCAGCTATGGCCAGCCAC
AAAGACGATGAAGAAAAGTTTTTCCCCATGCATGGAACCCTGATATTTGGTAAACAAGGA
ACAAATGCTAACGACGCGGATTTGGACAATGTCATGATTACAGATGAAGAAGAAATCCGC
ACCACCAATCCCGTGGCTACGGAGCAGTACGGATATGTGTCAAATAATTTGCAAAACTCA
AATACTGGTCCAACTACTGGAACTGTCAATCACCAAGGAGCGTTACCTGGTATGGTGTGG
CAGGATCGAGACGTGTACCTGCAGGGACCCATTTGGGCCAAGATTCCTCACACCGATGGA
CACTTTCATCCTTCTCCGCTGATGGGAGGTTTTGGGCTCAAACACCCGCCTCCTCAGATC
ATGATCAAAAACACTCCAGTTCCAGCCAATCCTCCCACAAACTTCAGTTCTGCCAAGTTT
GCTTCTTTCATCACACAGTATTCCACGGGGCAAGTCAGCGTGGAGATCGAGTGGGAGCTG
CAGAAGGAGAACAGCAAACGCTGGAACCCCGAGATCCAGTACACTTCCAACTACAACAAA
TCTGTTAATGTGGACTTTACTGTGGACACTAATGGTGTGTATTCAGAGCCTCGCCCCATT
GGCACCAGATACCTGACTCGTAATCTGTAATTGCTTGTTAATCAATAAACCGTTTAATTC
GTTCCAGTTGAACTTTGGTCTCCGCGTACTTCTTTTCTTATCTAGTTTCCATGGCTACGT
AGATAAGTAGCATGGCGGGTTAATCATTAACTACAAGGAACCCCTAGTGATGGAGTTGGC
CACTCCCTCTCTGCGCGCTCGCTCGCTCACTGAGGCCGGGCGACCAAAGGTCGCCCGACG
CCCGGGCTTTGCCCGGGCGGCCTCAGTGAGCGAGCGAGCGCGCAGAGAGGGAGTGGCCAA
SEQ ID NO: 106
>#1570_AAV.FL.linear [organism = Adeno-associated virus][mol_type = genomic
DNA][isolation_source = liver tissue][topology = linear]
GGACTCGCGGCCGCAAGTGGATAGGTGGAGCGATTTGAGGTCTATGGTGTAAAAGGAAAT
ATCTTCACCACCTTTGGTCGCCCGGCCTCAGTGAGCGAGCGAGCGCGCAGAGAGGGAGTG
GCCAACTCCATCACTAGGGGTTCCTGGAGGGGTGGAGTCGTGACGTGAATTACGTCATAG
GGTTAGGGAGGTCCTGTATTAGAGGTCACGTGAGTGTTTTGCGACATTTTGCGACACCAT
GTGGTCACGCTGGGTATTTAAGCCCGAGTGAGCACGCAGGGTCTCCATTTTGAAGCGGGA
GGTTTGAACGCGCAGCCGCCATGCCGGGATTTTACGAGATTGTGATTAAGGTCCCCAGCG
ACCTTGACGAGCATCTGCCCGGCATTTCTGACAGCTTTGTGAACTGGGTGGCCGAGAAGG
AATGGGAGTTGCCGCCAGATTCTGACATGGATCTGAATCTGATTGAGCAGGCACCCCTGA
CCGTGGCCGAAAAGCTGCAGCGTGACTTTCTGACGGAGTGGCGCCGCGTGAGTAAGGCCC
CGGAGGCCCTCTTCTTTGTGCAATTTGAGAAGGGAGAGAGTTACTTCCACATGCACATGC
TGGTGGAGACCACCGGGGTGAAATCCATGGTTTTGGGACGTTTCCTGAGTCAGATTCGCG
AAAAACTGATTCAGAGAATTTACCGCGGGATCGAGCCGACTTTGCCAAACTGGTTCGCGG
TCACAAAGACCCGAAATGGCGCCGGAGGCGGGAACAAGGTGGTGGATGAGTGCTACATCC
CCAATTACCTGCTCCCCAAAACCCAGCCTGAGCTCCAGTGGGCGTGGACTAATATGGAAC
AGTATTTAAGCGCCTGTTTGAATCTCGCGGAGCGTAAACGGTTGGTGGCGCAGCATCTGA
CGCACGTGTCGCAGACGCAGGAGCAGAACAAAGAGAATCAGAATCCCAATTCTGACGCGC
CGGTGATTAGATCAAAAACATCAGCCAGGTACATGGAGCTGGTCGGGTGGCTCGTGGATA
AGGGGATTACCTCGGAGAAGCAGTGGATCCAGGAGGACCAGGCKTCATACATCTCCTTCA
ATGCGGCCTCCAACTCGCGGTCCCAAATCAAGGCTGCTCTTGACAATGCGGGAAAGATCA
TGAGCCTGACTAAAACCGCCCCCGACTACCTGGTGGGCCAGCAGCCCGTGGAGGACATTT
CCAGCAATCGGATTTATAAAATCTTGGAACTGAACGGGTACGATCCCCAATACGCGGCTT
CCGTCTTTCTGGGATGGGCCACGAAAAAGTTCGGCAAGAGGAACACCATCTGGCTGTTTG
GGCCTGCAACCACCGGGAAGACCAACATCGCGGAGGCCATAGCCCACACTGTGCCCTTCT
ACGGGTGCGTAAACTGGACCAATGAGAACTTTCCCTTCAACGACTGCGTCGACAAGATGG
TGATCTGGTGGGAGGAGGGAAAGATGACTGCCAAGGTCGTGGAGTCTGCCAAAGCCATTC
TCGGAGGAAGCAAGGTGCGCGTGGACCAGAAATGCAAGTCCTCGGCCCAGATAGACCCGA
CTCCCGTGATCGTCACCTCCAACACCAACATGTGCGCCGTGATTGACGGGAACTCAACGA
CCTTCGAACATCAGCAGCCGTTGCAAGACCGGATGTTCAAATTTGAACTCACCCGCCGTC
TGGATCATGACTTTGGGAAGGTCACCAAGCAGGAAGTCAAAGACTTTTTCCGGTGGGCAA
AGGATCACGTGGTTGAGGTGGAGCATGAATTCTACGTCAAAAAGGGTGGAGCCAAAAAAA
GACCCGCCCCCAGTGACGCAGATATAAGTGAGCCCAAACGGGTGCGCGAGTCAGTTGCGC
AGCCATCGACGTCAGACGCGGAAGCTTCGATCAACTACGCGGACAGGTACCAAAACAAAT
GTTCTCGTCACGTGGGCATGAATCTGATGCTGTTTCCCTGCAGACAATGCGAGAGAATGA
ATCAGAATTCAAATATCTGCTTCACTCACGGACAGAAAGACTGTTTAGAGTGCTTTCCCG
TGTCAGAATCTCAACCCGTTTCTGTCGTCAAAAAGGCGTATCAGAAACTGTGCTACATTC
ATCATATTATGGGAAAGGTGCCAGACGCTTGCACTGCCTGCGATCTGGTCAATGTGGATT
TGGATGACTGCATCTCTGAACAATAAATGATTTAAATCAGGTATGGCTGCCGATGGTTAT
CTTCCAGATTGGCTCGAGGACACTCTCTCTGAAGGAATAAGACAGTGGTGGAAGCTCAAA
CCTGGCCCACCACCACCAAAGCCCGCAGAGCGGCATAAGGACGACAGCAGGGGTCTTGTG
CTTCCTGGGTACAAGTACCTCGGACCCTTCAACGGACTCGACAAGGGAGAGCCGGTCAAC
GAGGCAGACGCCGCGGCCCTCGAGCACGACAAGGCCTACGACCGGCAGCTCGACAGCGGA
GACAACCCGTACCTCAAGTACAACCACGCCGACGCGGAGTTTCAGGAGCGCCTTAAAGAA
GATACGTCTTTTGGGGGCAACCTCGGACGAGCAGTCTTCCAGGCGAAAAAGAGGGTTCTT
GAACCTCTGGGCCTGGTTGAGGAACCTGTTAAGACGGCTCCGGGAAAAAAGAGGCCGGTA
GAGCACTCTCCTGTGGAGCCAGACTCCTCCTCGGGAACCGGAAAAGCGGGCCAGCAGCCT
GCAAGAAAAAGATTGAATTTTGGTCAGACTGGAGACGCAGACTCCGTACCTGACCCCCAG
CCTCTCGGACAGCCACCAGCAGCCCCCTCTGGTTTGGGATCTACTACAATGGCTACAGGC
AGTGGCGCACCAGTGGCAGACAATAACGAGGGTGCCGATGGAGTGGGTAATTCCTCAGGA
AATTGGCATTGCGATTCCCAATGGCTGGGCGACAGAGTCATCACCACCAGCACCCGAACC
TGGGCCCTGCCCACCTACAACAACCACCTCTACAAGCAAATCTCCAGCCAATCAGGAGCC
TCAAACGACAACCACTACTTTGGCTACAGCACCCCTTGGGGGTATTTTGACTTCAACAGA
TTCCACTGCCACTTTTCACCACGTGACTGGCAAAGACTCATCAACAACAACTGGGGATTC
CGACCCAAGAGACTCAACTTCAAGCTCTTTAACATTCAAGTCAAAGAGGTCACGCAGAAT
GACGGTACGACGACGATTGCCAATAACCTTACCAGCACGGTTCAGGTGTTTACTGACTCG
GAGTACCAGCTCCCGTACGTCCTCGGCTCGGCGCATCAAGGATGCCTCCCGCCGTTTCCA
GCGGACGTCTTCATGGTCCCACAGTATGGATACCTCACCCTGAACAACGGGAGTCAGGCG
GTAGGACGCTCTTCCTTTTACTGCCTGGAGTACTTTCCTTCTCAGATGCTGCGTACTGGA
AACAACTTTCAGTTCAGCTACACCTTTGAAGACGTTCCTTTCCACAGCAGCTACGCTCAC
AGCCAGAGTCTGGATCGGCTGATGAATCCTCTGATCGACCAGTACCTGTATTATCTGAAC
AAAACACAAGCAAATAGTGGAACTCTTCAGCAGTCTCGGCTACTGTTTAGTCAAGCTGGA
CCCACCAGCATGTCTCTTCAAGCTAAAAACTGGCTGCCTGGACCTTGCTACAGACAGCAG
CGTCTGTCAAAGCAGGCAAACGACAACAACAACAGCAACTTTCCCTGGACTGCAGCTACA
AAGTATCATCTAAATGGCCGGGACTCGTTGGTTAATCCAGGACCAGCTATGGCCAGCCAC
AAAGACGATGAAGAAGAAAAGTTTTTCCCCATGCATGGAACCCTGATATTTGGTAAACAA
GGAACAAATGCTAACGACGCGGATTTGGACAATGTCATGATTACAGATGAAGAAGAAATC
CGCACCACCAATCCCGTGGCTACGGAGCAGTACGRATATGTGTCAAATAATTTGCAAAAC
TCAAATACTGGTCCAACTACTGGAACTGTCAATCACCAAGGAGCGTTACCTGGTATGGTG
TGGCAGGATCGAGACGTGTACCTGCAGGGACCCATTTGGGCCAAGATTCCTCACACCGAT
GGACACTTTCATCCTTCTCCGCTGATGGGAGGTTTTGGGCTCAAACACCCGCCTCCTCAG
ATCATGATCAAAAACACTCCAGTTCCTTCTCCGCTGATGGGAGGTTTTGGGCTCAAACAC
CCGCCTCCTCAGATCACACAGTATTCCACGGGGCAAGTCAGCGTGGAGATCGAGTGGGAG
CTGCAGAAGGAGAACAGCAAACGCTGGAACCCCGAGATCCAGTACACTTCCAACTACAAC
AAATCTGTTAATGTGGACTTTACTGTGGACACTAATGGTGTGTATTCAGAGCCTCGCCCC
ATTGGCACCAGATACCTGACTCGTAATCTGTAATTGCTTGTTAATCAATAAACCGTTTAA
TTCGTTCCAGTTGAACTTTGGTCTCCGCGTACTTCTTTTCTTATCTAGTTTCCATGGCTA
CGTAGATAAGTAGCATGGCGGGTTAATCATTAACTACAAGGAACCCCTAGTGATGGAGTT
GGCCACTCCCTCTCTGCGCGCTCGCTCGAGGAAAAAACTTTTCTTCATTTTGTGCACTGA
GGCCGTTTTTGCTTTCTTAAGTAATAGGCTTGGAATTTATCCCGGAATACATCTCTTAAA
GTT
SEQ ID NO: 107
>#704_AAV.FL.linear [organism = Adeno-associated virus][mol_type = genomic
DNA][isolation_source = liver tissue][topology = linear]
TTGGCCACTCCCTCTCTGCGCGCTCGCTCGCTCACTGAGGCCGGGCGACCAAAGGTCGGG
CGTCGGGCGACCTTGGCTTGGGCGGCCTCAGTGAGCGAGCGAGCGCGCAGAGAGGGAGTG
GCCAACTCCATCACTAGGGGTTCCTGGAGGGGTGGAGTCGTGACGTGAAGTACGTCATAG
GGTTAGGGAGGTCCTGTATTAGAGGTCACGTGAGTGTTTTGCGACATTTTGCGACACCAT
GTGGTCACGCTGAGTATTTAAGCCCGAGTGAGCACGCAGGGTCTCCATTTTGAAGCGGGA
GGTTTGAACGCGCAGCCGCCATGCCGGGGTTTTACGAGATTGTGATTAAGGTCCCCAGCG
ACCTTGACGAGCATCTGCCCGGCATTTCTGACAGCTTTGTAAACTGGGTGGCCGAGAAGG
AATGGGAGTTGCCGCCAGATTCTGACATGGATCTGAATCTGATTGAGCAGGCACCCCTGA
CCGTGGCCGAGAAGCTGCAGCGCGACTTTCTGACGGAGTGGCGCCGCGTGAGTAAAGCCC
CGGAGGCCCTCTTCTTTGTGCAATTTGAGAAGGGAGAGAGCTATTTCCACATGCACGTGC
TTGTGGAGACCACCGGAGTGAAATCCATGGTTTTGGGACGTTTCCTGAGTCAGATTCGCG
AAAAACTGATTCAGAGAATTTACCGCGGGATCGAGCCGACTTTGCCAAACTGGTTCGCGG
TCACAAAGACCCGAAATGGCGCCGGAGGCGGGAACAAGGTGGTGGATGAGTGCTACATCC
CCAATTACCTGCTCCCCAAAACCCAGCCTGAGCTCCAGTGGGCGTGGACTAATATGGAAC
AGTATTTAAGCGCCTGTTTGAATCTCGCGGAGCGTAAACGGTTGGTGGCGCAGCATCTGA
CGCACGTGTCGCAGACCCAGGAGCAGAACAAAGAGAATCAGAATCCCAATTCTGACGCGC
CGGTGATTAGATCAAAAACCTCAGCCAGGTACATGGAGCTGGTCGGGTGGCTCGTGGACA
AGGGGATTACCTCGGAGAAGCAGTGGATCCAGGAGGATCAGGCTTCATACATCTCCTTCA
ATGCGGCCTCCAACTCGCGGTCCCAGATCAAGGCTGCTCTGGACAATGCGGGAAAGATCA
TGAGCCTGACTAAAACTGCCCCCGACTACCTGGTGGGCCAGCAGCCCGTGGAGGACATTT
CCAGCAATCGGATTTATAAAATCTTGGAACTGAACGGGTACGATCCCCAATACGCGGCTT
CCGTATTTCTGGGATGGGCCACGAAAAAGTTCGGCAAGAGGAACACCATTTGGCTGTTTG
GGCCTGCAACTACCGGGAAGACCAACATCGCGGAGGCCATAGCCCACACTGTGCCCTTCT
ACGGGTGCGTAAACTGGACCAATGAGAACTTTCCGTTCAATGACTGCGTCGACAAGATGG
TGATCTGGTGGGAGGAGGGAAAGATGACCGCCAAGGTCGTGGAGTCGGCCAAAGCCATTC
TCGGAGGAAGCAAGGTGCGCGTGGACCAGAAATGCAAGTCCTCGGCCCAGATAGACCCGA
CTCCCGTGATCGTCACCTCCAACACCAACATGTGCGCCGTGATTGACGGGAACTCAACGA
CCTTCGAACACCAGCAGCCGTTGCAAGACCGGATGTTCAAATTTGAACTCACCCGCCGTC
TGGATCATGACTTTGGGAAGGTCACCAAGCAGGAAGTCAAAGACTTTTTCCGGTGGGCAA
AGGATCACGTGGTTGAGGTGGAGCATGAATTCTACGTCAAAAAGGGAGGAGCCAAGAAAA
GACCCGCCCCCAGTGACGCAGATATAAGTGAGCCCAAACGGGCGCGCGAGTCAGTTGCGC
AGCCATCAACGTCAGACGCGGAAGCTTCGATCAACTACGCGGACAGGTACCAAAACAAAT
GTTCTCGTCACGTGGGCATGAATCTGATGCTGTTTCCCTGCAGACAATGCGAGAGAATGA
ATCAGAATTCAAATATCTGCTTCACTCACGGACAGAAAGACTGTTTAGAGTGCTTTCCCG
TGTCAGAATCTCAACCCGTTTCTGTCGTCAAAAAGGCGTATCAGAAACTGTGCTACATTC
ATCATATTATGGGAAAGGTGCCAGACGCTTGCACTGCCTGCGATCTGGTCAATGTGGATT
TGGATGACTGCATCTCTGAACAATAAATGATTTAAATCAGGTATGGCTGCCGATGGTTAT
CTTCCAGATTGGCTCGAGGACACTCTCTCTGAAGGAATAAGACAGTGGTGGAAGCTCAAA
CCTGGCCCACCACCACCAAAGCCCGCAGAGCGGCATAAGGACGACAGCAGGGGTCTTGTG
CTTCCTGGGTACAAGTACCTCGGACCCTTCAACGGACTCGACAAGGGAGAGCCGGTCAAC
GAGGCAGACGCCGCGGCCCTCGAGCACGACAAGGCCTACGACCGGCAGCTCGACAGCGGA
GACAACCCGTACCTCAAGTACAACCACGCCGACGCGGAGTTTCAGGAGCGCCTTAAAGAA
GATACGTCTTTTGGGGGCAACCTCGGACGAGCAGTCTTCCAGGCGAAAAAGAGGGTTCTT
GAACCTCTGGGCCTGGTTGAGGAACCTGTTAAGACGGCTCCGGGAAAAAAGAGGCCGGTA
GAGCACTCTCCTGTGGAGCCAGACTCCTCCTCGGGAACCGGAAAAGCGGGCCAGCAGCCT
GCAAGAAAAAGATTGAATTTTGGTCAGACTGGAGACGCAGACTCCGTACCTGACCCCCAG
CCTCTCGGACAGCCACCAGCAGCCCCCTCTGGTCTGGGATCTACTACAATGGCTACAGGC
AGTGGCGCACCAATGGCAGACAATAACGAGGGTGCCGATGGAGTGGGTAATTCCTCAGGA
AATTGGCATTGCGATTCCCAATGGCTGGGCGACAGAGTCATCACCACCAGCACCCGAACC
TGGGCCCTGCCCACCTACAACAACCACCTCTACAAGCAAATCTCCAGCCAATCAGGAGCC
TCAAACGACAACCACTACTTTGGCTACAGCACCCCCTGGGGGTATTTTGACTTCAACAGA
TTCCACTGCCACTTTTCACCACGTGACTGGCAAAGACTCATCAACAACAACTGGGGATTC
CGACCCAAGAGACTCAACTTCAAGCTCTTTAACATTCAAGTCAAAGAGGTCACGCAGAAT
GACGGTACGACGACGATTGCCAATAACCTTACCAGCACGGTTCAGGTGTTTACTGACTCG
GAGTACCAGCTCCCGTACGTCCTCGGCTCGGCGCATCAAGGATGCCTCCCGCCGTTCCCA
GCGGACGTCTTCATGGTGCCACAGTATGGATACCTCACCCTGAACAACGGGAGTCAGGCA
GTAGGACGCTCTTCATTTTACTGCCTGGAGTACTTTCCTTCTCAGATGCTTCGTACTGGA
AACAACTTTCAGTTCAGCTACACCTTTGAAGACGTTCCTTTCCACAGCAGCTACGCTCAC
AGCCAGAGTCTGGATCGGCTGATGAATCCTCTGATTGACCAGTACCTGTATTATCTGAAC
AAAACACAATCAAATAGTGGAACTCTTCAGCAGTCTCGGCTACTGTTTAGTCAAGCTGGA
CCCACCAGCATGTCTCTTCAAGCTAAAAACTGGCTGCCTGGACCTTGCTACAGACAGCAG
CGTCTGTCAAAGCAGGCAAACGACAACAACAACAGCAACTTTCCCTGGACTGCGGCTACA
AAGTATCATCTAAATGGCCGGGACTCGTTGGTTAATCCAGGACCAGCTATGGCCAGCCAC
AAAGACGATGAAGAAAAGTTTTTCCCCATGCATGGAACCCTGATATTTGGTAAACAAGGA
ACAAATGCTAACGACGCGGATTTGGACAATGTCATGATTACAGATGAAGAAGAAATCCGC
ACCACCAATCCCGTGGCTACGGAGCAGTACGGATATGTGTCAAATAATTTGCAAAACTCA
AATACTGGTCCAACTACTGGAACTGTCAATCACCAAGGAGCGTTACCTGGTATGGTGTGG
CAGGATCGAGACGTGTACCTGCAGGGACCCATTTGGGCCAAGATTCCTCACACCGATGGA
CACTTTCATCCTTCTCCGCTGATGGGAGGTTTTGGACTCAAACACCCACCTCCTCAGATC
ATGATCAAAAACACTCCAGTTCCAGCCAATCCTCCCACAAACTTCAGTTCTGCCAAGTTT
GCTTCTTTCATCACACAGTACTCCACGGGGCAGGTCAGCGTGGAGATCGAGTGGGAGCTG
CAGAAGGAGAACAGCAAACGCTGGAACCCCGAGATCCAGTACACTTCCAACTACAACAAG
TCTGTTAATGTGGACTTTACTGTGGACACTAATGGTGTGTATTCAGAGCCTCGCCCCATT
GGCACCAGATACCTGACTCGTAATCTGTAATTGCTTGTTAATCAATAAACCGTTTAATTC
GTTTCAGTTGAACTTTGGTCTCTGCGTACTTCTTTCTTATGTAGTTTCCATGGCTACGTA
GATAAGTAGCATGGCGGGTTAATCATTAACTCTAAGGAACCCCTAGTGATGGAGTTGGCC
ACTCCCTCTCTGCGCGCTCGCTCGCTCACTGAGGCCGGGCGACCAAAGGTCGCCCGACGC
CCGGGCTTTGCCCGGGCGGCCTCAGTGAGCGAGCGAGCGCGCAGAGAGGGAGTGGCCAA
SEQ ID NO: 108
>#714_AAV.FL.linear [organism = Adeno-associated virus][mol_type = genomic
DNA][isolation_source = liver tissue][topology = linear]
TTGGCCACTCCCTCTCTGCGCGCTCGCTCGCTCACTGAGGCCGGGCGTCCAAAGGTCGCC
CGACGGGCGACCTTTGGTCGCCCGGCCTCAGTGAGCGAGCGAGCGCGCAGAGAGGGAGTG
GCCAACTCCATCACTAGGGGTTCCTGGAGGGGTGGAGTCGTGACGTGAAGTACGTCATAG
GGTTAGGGAGGTCCTGTATTAGAGGTCACGTGAGTGTTTTGCGACATTTTGCGACACCAT
GTGGTTACGCAGGGTATTTAAGCCCGAGTGAGCACGCAGGGTCTCCATTTTGAAGCGGGA
GGTTTGAACGCGCAGCCGCCATGCCGGGGTTTTACGAGATTGTGATTAAGGTCCCCAGCG
ACCTTGACGAGCATCTGCCCGGCATTTCTGACAGCTTTGTGAACTGGGTGGCCGAGAAGG
AATGGGAGTTGCCGCCAGATTCTGACATGGATCTGAATGTGATTGAGCAGGCACCCCTGA
CCGTGGCCGAGAAGCTGCAGCGCGACTTTCTGACGGAATGGCGCCGTGTGAGTAAGGCCC
CGGAGGCCCTCTTCTTTGTGCAATTTGAGAAGGGAGAGAGCTACTTCCACATGCACGTGC
TTGTGGAGACCACCGGGGTGAAATCCATGGTTTTGGGACGTTTCCTGAGTCAGATTCGCG
AAAAACTGATTCAGAGAATTTACCGCGGGATCGAGCCGACTTTGCCAAACTGGTTCGCGG
TCACAAAGACCCGAAATGGCGCCGGAGGCGGGAACAAGGTGGTGGATGAGTGCTACATCC
CCAATTACCTGCTCCCCAAAACCCAGCCTGAGCTCCAGTGGGCGTGGACTAATATGGAAC
AGTATTTAAGCGCCTGTTTGAATCTCGCGGAGCGTAAACGGTTGGTGGCGCAGCATCTGA
CGCACGTGTCGCAGACGCAGGAGCAGAACAAAGAGAATCAGAATCCCAATTCTGACGCGC
CGGTGATTAGATCAAAAACCTCAGCCAGGTACATGGAGCTGGTCGGGTGGCTCGTGGATA
AGGGGATTACGTCGGAGAAGCAGTGGATCCAGGAGGATCAGGCTTCATACATCTCCTTCA
ATGCGGCCTCCAACTCGCGGTCCCAAATCAAGGCTGCCTTGGACAATGCGGGAAAGATCA
TGAGCCTGACTAAAACTGCCCCCGACTACCTGGTGGGCCAGCAGCCCGTGGAAGACATTT
CCAGCAATCGGATTTATAAAATTTTGGAACTGAACGGGTACGATCCCCAATACGCGGCTT
CCGTCTTTCTGGGATGGGCCACGAAAAAGTTCGGCAAGAGAAACACCATCTGGCTGTTTG
GGCCTGCAACTACCGGGAAGACCAACATCGCGGAGGCCATAGCCCACACTGTGCCCTTCT
ACGGGTGCGTAAACTGGACCAATGAGAACTTTCCCTTCAACGACTGTGTTGACAAGATGG
TGATCTGGTGGGAGGAGGGGAAGATGACCGCCAAGGTCGTGGAGTCGGCCAAAGCCATTC
TCGGAGGAAGCAAGGTGCGCGTGGACCAGAAATGCAAGTCCTCGGCCCAGATAGACCCGA
CTCCCGTGATCGTCACCTCCAACACCAACATGTGCGCCGTGATTGACGGGAACTCAACGA
CCTTCGAGCACCAGCAGCCGTTGCAAGACCGGATGTTCAAATTTGAACTCACCCGCCGTC
TGGATCATGACTTTGGGAAGGTCACCAAGCAGGAAGTCAAAGACTTTTTCCGGTGGGCAA
AGGATCACGTGGTTGAGGTGGAGCATGAATTCTACGTCAAAAAGGGTGGAGCCAAGAAAA
GACCCGCCCCCAGTGACGCAGATATAAGTGAGCCCAAACGGGCGCGCGAGTCAGTTGCGC
AGCCATCGACGTCAGACGCGGAAGCTTCGATCAACTACGCGGACAGGTACCAAAACAAAT
GTTCTCGTCACGTGGGCATGAATCTGATGCTGTTTCCCTGCAGACAATGCGAGAGAATGA
ATCAAAATTCAAATATCTGCTTCACTCACGGACAGAAAGACTGTTTAGAGTGCTTTCCCG
TGTCAGAATCTCAACCCGTTTCTGTCGTCAAAAAGGCGTATCAGAAACTTTGCTACATTC
ATCATATCATGGGAAAAGTGCCAGACGCTTGCACTGCCTGCGATCTGGTCAATGTGGATT
TGGATGACTGCATCTCTGAACAATAAATGATTTAAATCAGGTATGGCTGCCGATGGTTAT
CTTCCAGATTGGCTCGAGGACACTCTCTCTGAAGGAATAAGACAGTGGTGGAAGCTCAAA
CCTGGCCCACCACCACCAAAGCCCGCAGAGCGGCATAAGGACGACAGCAGGGGTCTTGTG
CTTCCTGGGTACAAGTACCTCGGACCCTTCAACGGACTCGACAAGGGAGAGCCGGTCAAC
GAGGCAGACGCCGCGGCCCTCGAGCACGACAAGGCCTACGACCGGCAGCTCGACAGCGGA
GACAACCCGTACCTCAAGTACAACCACGCCGACGCGGAGTTTCAGGAGCGCCTTAAAGAA
GATACGTCTTTTGGGGGCAACCTCGGACGAGCAGTCTTCCAGGCAAAAAAGAGGGTTCTT
GAACCTCTGGGCCTGGTTGAGGAGCCTGTTAAAACGGCTCCGGGAAAAAAGAGGCCGGTA
GAGCACTCTCCTGCGGAGCCAGACTCCTCCTCGGGAATCGGAAAAGCGGGCCAGCAGCCT
GCAAGAAAAAGATTGAATTTCGGTCAGACTGGAGACGCAGACTCCGTACCTGACCCCCAG
CCTCTCGGACAGCCACCAGCAGCCCCCTCTGGTCTGGGATCTACTACAATGGCTACAGGC
AGTGGCGCACCAGTGGCAGACAATAACGAGGGTGCCGATGGAGTGGGTAATTCCTCAGGA
AATTGGCATTGCGATTCCCAATGGCTGGGCGACAGAGTCATCACCACCAGCACCCGAACC
TGGGCCCTGCCCACCTACAACAACCACCTCTACAAGCAAATCTCCAGCCAATCAGGAGCC
TCAAACGACAACCACTACTTTGGCTACAGCACCCCCTGGGGGTATTTTGACTTCAACAGA
TTCCACTGCCACTTTTCACCACGTGACTGGCAAAGACTCATCAACAACAACTGGGGATTC
CGACCCAAAAGACTCAACTTCAAGCTCTTTAACATTCAAGTCAAAGAGGTCACGCAGAAT
GACGGTACGACGACGATTGCCAATAACCTTACCAGCACGGTTCAGGTGTTTACTGACTCG
GAGTACCAGCTCCCGTACGTCCTCGGCTCGGCGCATCAAGGATGCCTCCCGCCGTTTCCA
GCGGACGTCTTCATGGTGCCACAGTATGGATACCTCACCCTGAACAACGGGAGTCAAGCG
GTAGGACGCTCTTCATTTTACTGCCTGGAGTACTTTCCTTCTCAGATGCTGCGTACCGGA
AACAACTTTCAGTTCAGCTACACCTTTGAAGACGTTCCTTTCCACAGCAGCTACGCTCAC
AGCCAGAGTCTGGATCGGCTGATGAATCCTCTGATCGACCAGTACCTGTATTATCTGAAC
AAGACACAATCAAATAGTGGAACTCTTCAGCAGTCTCGGCTACTGTTTAGTCAAGCTGGA
CCCACCAGCATGTCTCTTCAAGCTAAAAACTGGCTGCCTGGACCTTGCTACAGACAGCAG
CGTCTGTCAAAGCAGGCAAACGACAACAACAACAGCAACTTTCCCTGGACTGCGGCTACA
AAGTATCATCTAAATGGCCGGGACTCGTTGGTTAATCCAGGACCAGCTATGGCCAGCCAC
AAAGATGACGAAGAAAAGTTTTTCCCCATGCATGGAACCCTGATATTTGGTAAACAAGGA
ACAAATGCTAACGACGCGGATTTGGACAATGTCATGATTACAGATGAAGAAGAAATCAGG
ACCACCAATCCCGTGGCTACGGAGCAGTACGGATATGTGTCAAATAATTTGCAAAACTCA
AATACTGGTCCAACTACTGGAACTGTCAATCACCAAGGAGCGTTACCTGGTATGGTGTGG
CAGGATCGAGACGTGTACCTGCAGGGACCCATTTGGGCCAAGATTCCTCACACCGATGGA
CACTTTCACCCTTCTCCACTGATGGGAGGTTTTGGACTCAAACACCCGCCTCCTCAGATC
ATGATCAAAAACACTCCCGTTCCAGCCAATCCTCCCACAAATTTCAGTTCTGCCAAGTTT
GCTTCTTTCATCACACAGTACTCCACGGGGCAGGTCAGCGTGGAAATCGAGTGGGAGCTG
CAGAAGGAGAACAGCAAACGCTGGAATCCCGAAATTCAGTATACTTCCAACTACAACAAA
TCTGTTAATGTGGACTTTACTGTGGACACTAATGGTGTGTATTCAGAGCCTCGCCCCATT
GGCACCAGATACCTGACTCGTAATCTGTAATTGCTTGTTAATCAATAAACCGTTTAATTC
GTTTCAGTTGAACTTTGGTCTCTGTGTACTTCTTTTCTTATATAGTTTCCATGGCTACGT
AGATAAGTAGCATGGCGGTTAATCATTAACTCTAAGGAACCCCTAGTGATGGAGTTGGCC
ACTCCCTCTCTGCGCGCTCGCTCGCTCACTGAGGCCGCGCGGGCAAAGCCCGGCCGTCGG
GCGACCTTTGCCCGGGCGACCTTAGTGAGCGAGCGAGCGCGCAGAGAGGGAGTGGCCAA
SEQ ID NO: 109
>#3086_AAV.FL.linear [organism = Adeno-associated virus][mol_type = genomic
DNA][isolation_source = liver tissue][topology = linear]
TTGGCCACTCCCTCTCTGCGCGCTCGCTCGCTCACTGAGGCCGCCCGGGCAAAGCCCGGG
CGTCGGGCGACCTTTGGTCGCCCGGCCTCAGTGAGCGAGCGAGCGCGCAGAGAGGGAGTG
GCCAACTCCATCACTAGGGGTTCCTGGAGGGGTGGAGTCGTGACGTGAAGTACGTCATAG
GGTTAGGGAGGTCCTGTATTAGAGGTCACGTGAGTGTTTTGCGACATTTTGCGACACCAT
GTGGTCACGCTGGGTATTTAAGCCCGAGTGAGCACGCAGGGTCTCCATTTTGAAGCGGGA
GGTTTGAACGCGCAGCCGCCATGCCGGGGTTTTACGAGATTGTGATTAAGGTCCCCAGCG
ACCTTGACGAGCATTTGCCCGGCATTTCTGACAGCTTTGTGAACTGGGTGGCCGAGAAGG
AATGGGAGTTGCCGCCAGATTCTGACATGGATCTGAATCTGATTGAGCAGGCACCCCTGA
CCGTGGCCGAGAAGCTGCAGCGCGACTTTCTGACGGAATGGCGCCGCGTGAGTAAGGCCC
CGGAGGCCCTCTTCTTTGTGCAATTTGAGAAGGGAGAGAGCTACTTCCACATGCACGTGC
TGGTGGAGACCACCGGGGTGAAATCCATGGTTTTGGGACGTTTCCTGAGTCAGATTCGCG
AAAAACTGATTCAGAGAATTTACCGCGGGATCGAGCCGACTTTGCCAAACTGGTTCGCGG
TCACAAAGACCCGAAATGGCGCCGGAGGCGGGAACAAGGTGGTGGATGAGTGCTACATCC
CCAATTACCTGCTCCCCAAAACCCAGCCTGAGCTCCAGTGGGCGTGGACTAATATGGAAC
AGTATTTAAGCGCCTGTTTGAATCTCGCTGAGCGTAAACGGTTGGTGGCGCAGCATCTGA
CGCACGTGTCGCAGACGCAGGAGCAGAACAAAGAGAATCAGAATCTCAATTCTGACGCGC
CGGTTATTAGATCAAAAACCTCAGCCAGGTACATGGAGCTGGTCGGGTGGCTCGTGGATA
AGGGGATTACGTCGGAGAAGCAGTGGATTCAGGAAGACCAGGCTTCATACATATCCTTCA
ATGCGGCCTCCAACTCGCGGTCCCAGATCAAGGCTGCCTTGGACAATGCGGGAAAGATTA
TGAGCCTCACTAAAACTGCCCCCGACTACCTGGTGGGCCAGCAGCCCGTGGAGGACATTT
CCAGCAATCGGATTTATAAAATCTTGGAACTGAACGGGTACGATCCCCAATACGCGGCTT
CCGTCTTTCTGGGATGGGCCACGAAAAAGTTCGGCAAGAGGAACACCATCTGGCTGTTTG
GGCCTGCAACTACCGGGAAGACCAACATCGCGGAGGCCATAGCCCACACGGTTCCCTTCT
ACGGGTGCGTAAACTGGACCAATGAGAACTTTCCCTTCAATGACTGCGTCGACAAGATGG
TGATCTGGTGGGAGGAGGGGAAGATGACCGCCAAGGTCGTAGAGTCGGCCAAAGCCATTC
TCGGAGGAAGCAAGGTGCGCGTGGACCAGAAATGCAAGTCCTCGGCCCAGATAGACCCGA
CTCCCGTGATCGTCACCTCCAACACCAACATGTGCGCCGTGATTGACGGGAACTCAACGA
CCTTCGAGCACCAGCAGCCGTTGCAAGACCGGATGTTCAAATTTGAACTTACCCGCCGTC
TGGATCATGACTTTGGGAAGGTCACAAAGCAGGAAGTCAAAGACTTTTTCCGGTGGGCAA
AGGATCACGTGGTTGAGGTGGAGCATGAATTCTACGTCAAAAAGGGTGGAGCCAAGAAAA
GACCCGCCCCCAGTGACGCAGATATAAGTGAGCCCAAACGGGCGCGCGAGTCAGTTGCGC
AGCCATCGACGTCAGACGCGGAAGCTTCAATCAACTACGCGGACAGGTACCAAAACAAAT
GTTCTCGTCACGTGGGCATGAATCTGATGCTGTTTCCCTGCAGACAATGCGAGAGAATGA
ATCAGAATTCAAATATCTGCTTCACTCACGGACAGAAAGACTGTTTAGAGTGCTTTCCCG
TGTCAGAATCTCAACCCGTTTCTGTCGTCAAAAAGGCGTATCAGAAACTTTGCTACATTC
ATCATATCATGGGAAAGGTGCCAGACGCTTGCACTGCCTGCGATATGGTCAATGTGGATT
TGGATGACTGCATCTCTGAACAATAAATGATTTAAATCAGGTATGGCTGCCGATGGTTAT
CTTCCAGATTGGCTCGAGGACACTCTCTCTGAAGGAATAAGACAGTGGTGGAAGCTCAAA
CCTGGCCCACCACCACCAAAGCCCGCAGAGCGGCATAAGGACAACAGCAGGGGTCTTGTG
CTTCCTGGGTACAAGTACCTCGGACCCTTCAACGGACTCGACAAGGGAGAGCCGGTCAAC
GAGGCAGACGCCGCGGCCCTCGAGCACGACAAGGCCTACGACCGGCAGCTCGACAGCGGA
GACAACCCGTACCTCAAGTACAACCACGCCGACGCGGAGTTTCAGGAGCGTCTTAAAGAA
GATACGTCTTTTGGGGGCAACCTCGGACGAGCAGTCTTCCAGGCGAAAAAGAGGGTTCTT
GAACCTCTGGGCCTGGTTGAGGAGCCTGTTAAGACGGCTCCGGGAAAAAAGAGGCCGGTA
GAGCACTCTCCTGTGGAGCCAGACTCCTCCTCGGGAACCGGAAAAGCGGGCCAACAGCCT
GCGAAAAAAAGACTGAATTTTGGTCAGACTGGAGACGCAGACTCCGTACCTGACCCCCAG
CCTCTCGGACAGCCACCAGCAGCCCCCTCTGGTCTGGGATCTACTACAATGGCTACAGGC
AGTGGCGCACCAATGGCAGACAATAACGAGGGTGCCGATGGAGTGGGTAATTCCTCAGGA
AATTGGCATTGCGATTCCCAATGGCTGGGCGACAGAGTCATCACCACCAGCACCCGAACC
TGGGCCCTGCCCACCTACAACAACCACCTCTACAAGCAAATCTCCAGCCAATCAGGAGCC
TCAAACGACAACCACTACTTTGGCTACAGCACCCCTTGGGGGTATTTTGACTTCAACAGA
TTCCACTGCCACTTTTCACCACGTGACTGGCAAAGACTCATCAACAACAACTGGGGATTC
CGACCCAAAAGACTCAACTTCAAGCTCTTTAACATTCAAGTCAAAGAGGTCACGCAGAAT
GACGGTACGACGACGATTGCCAATAACCTTACCAGCACGGTTCAGGTGTTTACTGACTCG
GAGTACCAGCTCCCGTACGTCCTCGGCTCGGCGCATCAAGGATGCCTCCCGCCGTTCCCA
GCGGACGTCTTCATGGTCCCACAGTATGGATACCTCACCCTGAACAACGGGAGTCAGGCG
GTAGGACGCTCTTCCTTTTACTGCCTGGAGTACTTTCCTTCTCAGATGCTGCGTACTGGA
AACAACTTTCAGTTCAGCTACACCTTTGAAGACGTTCCTTTCCACAGCAGCTACGCTCAC
AGCCAGAGTCTGGATCGGCTGATGAATCCTCTGATTGACCAGTACCTGTATTATCTGAAC
AAGACACAATCAAATAGTGGAACTCTTCAGCAGTCTCGGCTACTGTTTAGCCAAGCTGGA
CCCACCAACATGTCTCTTCAAGCTAAAAACTGGCTGCCTGGACCTTGCTACAGACAGCAG
CGTTTATCAAAGCAGGCAAACGACAACAATAACAGCAACTTTCCCTGGACTGCAGCTACA
AAGTATCATCTAAATGGCCGGGACTCGTTGGTTAATCCAGGACCAGCTATGGCCAGTCAT
AAAGACGATGAAGAAAAGTTTTTCCCCATGCATGGAACCCTGATATTTGGTAAACAAGGA
ACAAATGCCAACGACGCGGATTTGGACAATGTCATGATTACAGATGAAGAAGAAATCCGC
ACCACAAATCCTGTAGCTACGGAGCAGTACGGATATGTGTCAAATAATTTGCAAAACTCA
AATACTGGTCCAACTACTGGAACTGTCAATCACCAAGGAGCGTTACCTGGTATGGTGTGG
CAGGATCGAGACGTGTACCTGCAGGGACCCATATGGGCCAAGATTCCTCACACCGATGGA
CACTTTCATCCTTCTCCGCTGATGGGAGGTTTTGGACTCAAACACCCACCTCCTCAGATC
ATGATCAAAAACACTCCCGTTCCAGCCAATCCTCCTACAAACTTCAGTTCTGCCAAGTTT
GCTTCTTTCATCACACAGTATTCCACGGGACAGGTCAGCGTGGAGATCGAGTGGGAGCTG
CAGAAGGAGAACAGCAAACGCTGGAACCCCGAGATCCAGTACACTTCTAACTACAACAAA
TCTGTTAATGTGGACTTTACTGTGGACACTAATGGTGTGTATTCAGAGCCTCGCCCCATT
GGCACCAGATACCTGACTCGTAATCTGTAATTGCTTGTTAATCAATAAACCGTTTAATTC
GTTTCAGTTGAACTTTGGTCTTTGCGTACTTATTTCTTATCTAGTTTCCATGGCTACGTA
GATAAGTGCCATGGTGGGTTAATCATTAACTCTAAGGAACCCCTAGTGATGGAGTTGGCC
ACTCCCTCTCTGCGCGCTCGCTCGCTCACTGAGGCCGCCCGGGCAAAGCCCGGGCGTCGG
GCGACCTTTGGTCGCCCGGCCTCAGTGAGCGAGATTCAAACAGAGAGGGAGTGGCCAA
SEQ ID NO: 110
>#3142_AAV.FL.linear [organism = Adeno-associated virus][mol_type = genomic
DNA][isolation_source = liver tissue][topology = linear]
TTGGCCACTCCCTCTCTGCGCGCTCGCTCGCTCACTGAGGCCGCCCGGGCAAAGCCCGGG
CGTCGGGCGACCTTTGGTCGCCCGGCCTCAGTGAGCGAGCGAGCGCGCAGAGAGGGAGTG
GCCAACTCCATCACTAGGGGTTCCTGGAGGGGTGGAGTCGTGACGTGAAGTACGTCATAG
GGTTAGGGAGGTCCTGTATTAGAGATCACGTGAGTGTTTTGCGACATTTTGCGACACCAT
GTGGTTACGCAGGGTATTTAAGCCCGAGTGAGCACGCAGGGTCTCCATTTTGAAGCGGGA
GGTTTGAACGCGCAGCCGCCATGCCGGGGTTTTACGAGATTGTGATTAAGGTCCCCAGCG
ACCTTGACGAGCATCTGCCCGGCATTTCTGACAGCTTTGTAAACTGGGTGGCCGAGAAGG
AATGGGAGTTGCCGCCAGATTCTGACATGGATCTGAATCTGATTGAGCAGGCACCCCTGA
CCGTGGCCGAAAAGCTGCAGCGCGAGTTTCTGACGGAATGGCGCCGTGTGAGTAAAGCCC
CGGAGGCCCTCTTCTTTGTGCAATTTGAGAAGGGAGAGAGCTACTTCCACATGCACGTGC
TGGTGGAGACCACCGGGGTGAAATCCATGGTTTTGGGACGTTTCCTGAGTCAGATTCGCG
AAAAACTGATTCAGAGAATTTACCGCGGGATCGAGCCGACTTTGCCAAACTGGTTCGCGG
TCACAAAGACCCGAAATGGCGCCGGAGGCGGGAACAAGGTGGTGGATGAGTGCTACATCC
CCAATTACCTGCTCCCCAAAACCCAACCTGAGCTCCAGTGGGCGTGGACTAATATGGAAC
AGTATTTAAGCGCCTGTTTGAATCTCGCGGAGCGTAAACGGTTGGTGGCGCAGCATCTGA
CGCACGTGTCGCAGACGCAGGAGCAGAACAAAGAGAATCAGAATCCCAATTCTGACGCGC
CGGTGATTAGATCAAAAACCTCAGCCAGGTACATGGAGCTGGTCGGGTGGCTCGTGGATA
AGGGGATTACCTCCGAGAAGCAGTGGATTCAGGAGGACCAGGCCTCATACATCTCCTTCA
ATGCGGCCTCCAACTCGCGGTCCCAAATCAAGGCTGCTCTGGACAATGCGGGAAAGATCA
TGAGCCTGACTAAAACGGCCCCCGACTACCTGGTGGGTCAGCAGCCCGTGGAGGACATTT
CCGGCAATCGGATTTATAAGATCTTGGAACTGAACGGGTACGATCCCCAATACGCGGCTT
CCGTCTTTCTGGGATGGGCCACGAAAAAGTTCGGCAAGAGAAACACCATCTGGCTGTTTG
GGCCTGCAACTACCGGGAAGACCAACATCGCGGAGGCCATAGCCCACACTGTGCCCTTTT
ACGGGTGCGTAAACTGGACCAATGAGAACTTTCCGTTCAATGACTGCGTCGACAAGATGG
TGATCTGGTGGGAGGAGGGAAAGATGACCGCCAAGGTCGTGGAGTCGGCCAAAGCCATTC
TCGGAGGAAGCAAGGTGCGCGTGGACCAGAAATGCAAGTCTTCGGCCCAGATCGACCCGA
CTCCCGTGATCGTCACCTCCAACACCAACATGTGCGCCGTGATTGACGGGAACTCAACGA
CCTTCGAACACCAGCAGCCGTTGCAAGACCGGATGTTCAAATTTGAACTCACCCGCCGTC
TGGATCATGACTTTGGGAAGGTCACCAAGCAGGAAGTCAAAGACTTTTTCCGGTGGGCAA
AGGATCACGTGGTTGAGGTGGAGCATGAATTCTACGTCAAAAAGGGTGGAGCTAAGAAAA
GGCCCGCCCCCAGTGACGCAGATATAAGTGAGCCCAAACGGGCGCGCGAGTCAGTTGCGC
ATCCATCGACGTCAGACGCGGAAGCTTCGATCAACTACGCGGACAGGTACCAAAACAAAT
GTTCTCGTCACGTGGGCATGAATCTGATGCTGTTTCCCTGCAGACAATGCGAGAGAATGA
ATCAGAATTCAAATATCTGCTTTACTCACGGACAGAAAGACTGTTTAGAGTGCTTTCCCG
TGTCAGAATCTCAACCCGTTTCTGTCGTCAAAAAGAAGACTTATCAGAAACTGTGTCCAA
TTCATCACATTTTGGGAAGAGCACCCGAGATTGCGTGTTCGGCCTGCGATCTGGCCAATG
TGGACTTGGATGACTGTGTTTCTGAACAATAAATGATTTAAATCAGGTATGGCTGCCGAT
GGTTATCTTCCAGATTGGCTCGAGGACACTCTCTCTGAAGGAATAAGACAGTGGTGGAAG
CTCAAACCTGGCCCACCACCACCAAAGCCCGCAGAGCGGCATAAGGACGACAGCAGGGGT
CTTGTGCTTCCTGGGTACAAGTACCTCGGACCCTTCAACGGACTCGACAAGGGAGAGCCG
GTCAACGAGGCAGACGCCGCGGCCCTCGAGCACGACAAGGCCTACGACCGGCAGCTCGAC
AGCGGAGACAACCCGTACCTCAAGTACAACCACGCCGACGCGGAGTTTCAGGAGCGTCTT
AAAGAAGATACGTCTTTTGGGGGCAACCTCGGACGAGCAGTCTTCCAGGCGAAAAAGAGG
GTTCTTGAACCTCTGGGCCTGGTTGAGGAACCTGTTAAGACGGCTCCGGGAAAAAAGAGG
CCGGTAGAGCACTCTCCTGCGGAGCCAGACTCCTCCTCGGGAACCGGAAAGGCGGGCAAC
CAGCCTGCAAGAAAAAGACTGAATTTCGGTCAGACTGGAGACGCAGACTCCGTACCTGAC
CCCCAGCCTATCGGACAGCCACCAGCAGCCCCCACAAGTTTGGGATCTACTACAATGGCT
ACAGGCAGTGGCGCACCAATGGCAGACAATAACGAGGGTGCCGATGGAGTGGGTAATTCC
TCAGGAAATTGGCATTGCGATTCCCAATGGCTGGGCGACAGAGTCATTACCACCAGCACC
CGAACCTGGGCCCTGCCCACCTACAACAACCACCTCTACAAGCAGATCTCCAGCCAATCA
GGAGCTTCAAACGACAACCACTACTTTGGCTACAGCACCCCCTGGGGGTATTTTGACTTC
AACAGATTCCACTGCCACTTTTCACCACGTGACTGGCAAAGACTCATCAACAACAATTGG
GGATTCCGGCCCAAAAGACTCAACTTCAAGCTCTTTAACATTCAAGTCAAGGAGGTCACG
CAGAATGACGGTACGACGACGATTGCCAATAACCTTACCAGCACGGTTCAGGTGTTTACT
GACTCGGAGTACCAGCTCCCGTACGTCCTCGGCTCGGCGCATCAAGGATGCCTCCCGCCG
TTTCCAGCGGACGTCTTCATGGTCCCACAGTATGGATACCTCACCCTAAACAACGGGAGT
CAGGCGGTAGGACGCTCTTCCTTTTACTGCCTGGAGTACTTTCCTTCTCAGATGCTGCGT
ACTGGAAACAACTTTCAGTTCAGCTACACCTTTGAAGACGTTCCTTTCCACAGCAGCTAT
GCTCACAGCCAGAGTCTGGATCGGCTGATGAATCCTCTGATCGACCAGTACCTGTATTAT
CTGAACAAGACACAATCAAATAGTGGAACTGTTCAGCAGTCTCGGCTACTGTTTAGCCAA
GCTGGACCCACCAGCATGTCTCTTCAAGCTAAAAACTGGCTGCCTGGACCTTGCTACAGA
CAGCAGCGTCTGTCAAAGCAGGCAAGCGACAACAACAACAGCAACTTTCCCTGGACTGCG
GCTACAAAGTATCATCTAAATGGCCGGGACTCGTTGGTTAATCCAGGACCAGCTATGGCC
AGTCACAAGGATGACGAAGAAAAGTTTTTCCCCATGCATGGAACCCTGATATTTGGTAAA
GAAGGAACAACTTCTAACAACGCGGATTTGGAACATGTCATGATTACAGATGAAGAAGAA
ATCAGGACCACTAATCCAGTGGCTACGGAGCAGTACGGAAATGTGTCAAATAATTTGCAA
AACTCAAATACTGGTCCAACTACTGAAAATGTCAATAACCAAGGAGCGTTACCTGGTATG
GTGTGGCAGGATAGAGACGTGTACCTGCAGGGACCCATTTGGGCCAAGATTCCACACACG
GACGGACACTTTCATCCTTCTCCGCTTATGGGAGGTTTTGGACTCAAACACCCACCTCCT
CAAATCATGATCAAAAACACTCCCGTTCCAGCCAATCCTCCTACAAACTTCAGTGCGGCA
AAGTTTGCTTCTTTCATCACACAGTACTCCACGGGGCAGGTCAGCGTGGAGATCGAGTGG
GAGCTGCAGAAAGAGAACAGCAAACGCTGGAACCCCGAGATCCAGTACACTTCCAATTAC
AACAAATCTGTTAATGTGGACTTTACTGTGGACACTAATGGCGTGTATTCAGAGCCTCGC
CCCATTGGCACCAGATACCTGACTCGTAATCTGTAATTGCTTGTTAATCAATAAACCGTT
TAATTCGTTTCAGTTGAACTTTGGTCTCTGCGTACTTCTTTTATTATCTAGTTTCCATGG
CTACGTAGATAAGTAGCATGGCGGGTTAATCATTAACTCTAAGGAACCCCTAGTGATGGA
GTTGGCCACTCCCTCTCTGCGCGCTCGCTCGCTCACTGAGGCCGCCCGGGCAAAGCCCGG
GCGTCGGGCGACCTTTGGTCGCCCGGCCTCAGTGAGCGAGCGAGCGCGCAGAGAGGGAGT
GGCCAA
SEQ ID NO: 111
>#1024_AAV.FL.linear [organism = Adeno-associated virus][mol_type = genomic
DNA][isolation_source = liver tissue][topology = linear]
TTGGCCACTCCCTCTCTGCGCGCTCGCTCGCTCACTGAGGCCGGGCGACCAAAGGTCGCC
CGACGCCCGGGCTTTGCCCGGGCGGCCTCAGTGAGCGAGCGAGCGCGCAGAGAGGGAGTG
GCCAACTCCATCACTAGGGGTTCCTGGAGGGGTGGAGTCGTGACGTGAAGTACGTCATAG
GGTTAGGGAGGTCCTGTATTAGAGGTCACGTGAGTGTTTTGCGACATTTTGCGACACCAT
GTGGTTACGCTGGGTATTTAAGCCCGAGTGAGCACGCAGGGTCTCCATTTTGAAGCGGGA
GGTTTGAACGCGCAGCCGCCATGCCGGGGTTTTACGAGATTGTGATTAAGGTCCCCAGCG
ACCTTGACGAGCATCTGCCCGGTATTTCTGACAGCTTTGTGAACTGGGTGGCCGAGAAAG
AATGGGAGTTGCCGCCAGATTCTGACATGGATCTGAATCTGATTGAGCAGGCACCCCTGA
CCGTAGCCGAGAAACTGCAGCGCGACTTTCTGACAGAATGGCGCCGTGTGAGTAAGGCCC
CCGAGGCCCTCTTTTTTGTGCAATTTGAAAAGGGAGAGAGCTACTTCCACATGCACGTGC
TGGTGGAGACCACCGGGGTGAAGTCCATGGTTTTGGGACGTTTCCTGAGTCAGATTCGCG
AAAAACTGATTCAGAGAATTTACCGCGGGATCGAGCCGACTTTGCCAAATTGGTTCGCGG
TCACAAAGACCCGAAATGGCGCCGGAGGCGGGAACAAGGTGGTGGACGAGTGCTACATCC
CCAATTACCTGCTCCCTAAAACCCAGCCTGAGCTCCAGTGGGCGTGGACTAATATGGAAC
AGTATTTAAGCGCCTGTTTGAACCTCGCGGAGCGTAAACGGTTGGTGGCGCAGCATCTGA
CGCACGTGTCGCAGACCCAGGAGCAGAACAAAGAAAATCAGAATCCCAATTCTGACGCGC
CGGTGATCAGATCAAAAACCTCAGCCAGGTACATGGAGCTGGTCGGGTGGCTCGTGGACA
AGGGGATTACCTCCGAGAAACAGTGGATTCAGGAGGACCAGGCTTCATACATCTCCTTCA
ATGCGGCCTCCAACTCGCGGTCTCAAATCAAGGCTGCTCTGGACAATGCGGGAAAGATTA
TGAGCCTCACTAAAACCGCCCCCGACTACCTGGTGGGCCAGCAGCCCGTGGAGGACATTT
CCGGCAATCGGATTTATAAAATCTTGGAACTGAACGGGTACGATCCCCAATACGCGGCTT
CCGTCTTTCTGGGATGGGCCACGAAAAAGTTCGGCAAGAGGAACACCATCTGGCTGTTTG
GGCCTGCAACTACCGGGAAGACCAACATCGCGGAGGCCATAGCCCACACGGTGCCCTTCT
ACGGGTGCGTAAACTGGACCAACGAGAACTTTCCCTTTAACGACTGCGTCGACAAGATGG
TGATTTGGTGGGAGGAGGGGAAGATGACCGCCAAGGTCGTGGAATCGGCCAAAGCCATTC
TCGGAGGAAGCAAGGTGCGCGTGGACCAGAAATGCAAGTCCTCGGCCCAGATAGACCCGA
CTCCCGTGATCGTCACCTCCAACACCAACATGTGCGCCGTGATTGACGGGAACTCAACGA
CCTTCGAGCACCAGCAGCCGTTGCAAGACCGGATGTTCAAATTTGAACTCACCCGCCGTC
TGGATCATGACTTTGGGAAGGTCACCAAGCAGGAAGTCAAAGACTTTTTCCGGTGGGCAA
AGGATCACGTGGTTGAGGTGGAGCATGAATTCTACGTCAAAAAGGGTGGAGCTAAGAAAA
GGCCCGCCCCCAGTGACGCAGATATAAGTGAGCCCAAACGGGCGCGCGAGTCAGTTGCGC
AGACATCGACGTCAGACGCGGAAGCTTCGATCAACTACGCGGACAGGTACCAAAACAAAT
GTTCTCGTCACGTGGGCATGAATCTGATGCTGTTTCCGTGCAAAACCTGCGAGAGAATGA
ATCAGATTTCAAATGTCTGTTTCACGCACGGTGTCAAAGACTGTGGGGAGTGCTTTCCCG
TGTCAAAATCTCAACCCGTTTCTGTCGTCAAAAAGAAGACTTATCAGAAACTGTGTCCAA
TTCATCACATTTTGGGAAGAGCACCCGAGATTGCGTGTTCGGCCTGCGATATGGCCAATG
TGGACTTGGATGACTGTGTTTCTGAACAATAAATGACTTAAACCAGGTATGGCTGCCGAT
GGTTATCTTCCAGATTGGCTCGAGGACAACCTCAGTGAAGGAATTCGCGAGTGGTGGGCT
TTGAAACCTGGAGCCCCTCAACCCAAGGCAAATCAACAACATCAAGACAACGCTCGGGGT
CTTGTGCTTCCGGGTTACAAATACCTTGGACCCGGCAACGGACTCGACAAGGGGGAGCCG
GTCAACGCAGCAGACGCGGCGGCCCTCGAGCACGACAAGGCATACGACAAGCAGCTCAAG
GCCGGAGACAACCCGTACCTCAAGTACAACCACGCCGACGCGGAGTTTCAGGAGCGTCTT
AAAGAAGATACGTCTTTTGGGGGCAACCTCGGACGAGCAGTCTTCCAGGCGAAAAAGAGG
GTTCTCGAACCTCTGGGCCTGGTTGAGGAACCTGTTAAGACGGCTCCGGGAAAAAAGAGG
CCGGTAGAGCACTCTCCTGCGGAGCCAGATTCCTCCTCCGGAACTGGAAAGTCGGGCCAA
CAGCCTGCAAGAAAAAGATTGAATTTTGGTCAGACTGGAGACGCAGACTCCGTACCTGAC
CCCCAGCCTCTCGGACAGCCACCAGCAGCCCCCTCTGGTCTGGGATCTACTACAATGGCT
ACAGGCAGTGGCGCACCAATGGCAGACAATAACGAGGGTGCCGATGGAGTGGGTAATTCC
TCAGGAAATTGGCATTGCGATTCCCAATGGCTGGGCGACAGAGTCATCACCACCAGCACC
CGAACCTGGGCCCTGCCCACCTACAACAATCACCTCTACAAGCAAATCTCCAGCCAATCA
GGAGCTTCGAACGACAACCACTACTTTGGCTACAGCACCCCTTGGGGGTATTTTGACTTC
AACAGATTCCACTGCCACTTTTCACCACGTGACTGGCAAAGACTCATCAACAACAACTGG
GGATTCCGACCCAAGAGACTCAACTTCAAGCTCTTTAACATTCAAGTCAAAGAGGTCACG
CAGAATGACGGTACGACGACGATTGCCAATAACCTTACCAGCACGGTTCAGGTGTTTACT
GACTCGGAGTACCAGCTCCCGTACGTCCTCGGCTCGGCGCATCAAGGATGCCTCCCGCCG
TTTCCAGCGGACGTCTTCATGGTGCCACAGTATGGATACCTCACCCTAAACAACGGGAGT
CAGGCGGTAGGACGCTCTTCCTTTTACTGCCTGGAGTACTTTCCTTCTCAGATGCTGCGT
ACAGGAAACAACTTTCAGTTCAGCTACACTTTTGAAGACGTGCCTTTCCACAGCAGCTAC
GCTCACAGCCAGAGTCTGGATCGGCTAATGAATCCTCTGATCGACCAGTACCTGTATTAT
CTAAACAGGACACAAACAGCCAGTGGAACTCAGCAGTCTCGGCTACTGTTTAGCCAAGCT
GGACCCACCAGCATGTCTCTTCAAGCTAAAAACTGGCTGCCTGGACCTTGCTACAGACAA
CAGCGTTTGTCAAAGCAGGCAAACGACAACAACAATAGCAACTTTCCCTGGACTGCGGCT
ACAAAGTACCACCTCAATGGCAGAGACTCTCTGGTGAATCCGGGCCCTGCTATGGCCAGT
CACAAAGACGATGAAGAAAAGTTTTTCCCCATGCATGGAACCCTGATATTTGGTAAAGAA
GGAACAAATGCTACCAACGCGGATTTGGACAATGTCATGATTACAGATGAAGAAGAAATC
CGCACCACAAATCCTGTAGCTACGGAGCAGTATGGATATGTGTCAAATAATTTGCAAAAC
TCAAATACTGCTGCAACTACTGAAACTGTCAATCACCAAGGAGCGTTACCTGGTATGGTG
TGGCAGGATAGAGACGTGTACCTGCAGGGACCCATTTGGGCCAAAATTCCTCACACCGAT
GGACACTTTCATCCTTCTCCGCTGATGGGAGGTTTTGGACTCAAACACCCACCTCCTCAG
ATCATGATCAAAAACACTCCCGTTCCAGCCAATCCTCCCACAAACTTTAGTGCGGCAAAG
TTTGCTTCTTTCATCACACAGTATTCCACGGGGCAAGTCAGCGTGGAGATCGAGTGGGAG
CTGCAGAAGGAGAACAGCAAACGCTGGAACCCCGAGATCCAGTACACTTCCAACTACAAC
AAATCTGTTAATGTGGACTTTACTGTGGACACTAATGGTGTGTATTCAGAGCCTCGCCCC
ATTGGCACCAGATACCTGACTCGTAATCTGTAATTGCTTGTTAATTAATAAACCGTTTAA
TTCGTTTCAGTTAAACTTTGGTCTCTGCGTACTTCTTTCTTATCTAGTTTCCATGGCTAC
GTAGATAAGTACCATGGCGGGTTAATCATTAACTCTAAGGAACCCCTAGTGATGGAGTTG
GCCACTCCCTCTCTGCGCGCTCGCTCGCTCACTGAGGCCGCCCGGGCAAAGCCCGGGCGT
CGGGCGACCTTTGGTCGCCCGGCCTCAGTGAGCGAGCGAGCGCGCAGAGAGGGAGTGGCC
AA
SEQ ID NO: 112
>#790_AAV.FL.linear [organism = Adeno-associated virus][mol_type = genomic
DNA][isolation_source = liver tissue][topology = linear]
TTGGCCACTCCCTCTCTGCGCGCTCGCTCGCTCACTGAGGCCGCCCGGGCAAAGCCCGGG
CGTCGGGCGACCTTTGGTCGCCCGGCCTCAGTGAGCGAGCGAGCGCGCAGAGAGGGAGTG
GCCAACTCCATCACTAGGGGTTCCTGGAGGGGTGGAGTCGTGACGTGAAGTACGTCATAG
GGTTAGGGAGGTCCTGTATTAGAGGTCACGTGAGTGTTTTGCGACATTTTGCGACACCAT
GTGGTCACGCTGGTATTTAAGCCCGAGTGAGCACGCAGGGTCTCCATTTTGAAGCGGGAG
GTTTGAACGCGCAGCCGCCATGCCGGGATTTTACGAGATTGTGATTAAGGTCCCCAGCGA
CCTTGACGAGCATCTGCCCGGCATTTCTGACAGCTTTGTGAACTGGGTGGCCGAGAAGGA
ATGGGAGTTGCCGCCAGATTCTGACATGGATCTGAATCTGATTGAGCAGGCACCCCTGAC
CGTGGCCGAGAAGCTGCAGCGCGACTTTCTGACGGAGTGGCGCCGCGTGAGTAAGGCCCC
GGAGGCCCTCTTCTTTGTGCAATTTGAGAAGGGAGAGAGCTACTTCCACATGCACGTGCT
TGTGGAAACTACCGGGGTGAAATCCATGGTTTTGGGACGTTTCCTGAGTCAGATTCGCGA
AAAACTGATTCAGAGAATTTACCGCGGGATCGAGCCGACTTTGCCAAACTGGTTCGCGGT
CACAAAGACCCGAAATGGCGCCGGAGGCGGGAACAAGGTGGTGGATGAGTGCTACATCCC
CAATTACCTGCTCCCCAAAACCCAACCTGAGCTCCAGTGGGCGTGGACTAATATGGAACA
GTATTTAAGCGCCTGTTTGAATCTCGCGGAGCGTAAACGGTTGGTGGCGCAGCATCTGAC
GCACGTGTCGCAGACGCAGGAGCAGAACAAAGAGAATCAGAATCCCAATTCTGACGCGCC
GGTGATCAGATCAAAAACCTCAGCCAGGTACATGGAGCTTGTCGGGTGGCTCGTGGATAA
GGGGATTACGTCGGAGAAGCAGTGGATCCAGGAGGACCAGGCTTCATACATCTCCTTCAA
TGCGGCCTCCAACTCGCGGTCTCAAATCAAGGCTGCTCTGGACAATGCGGGGAAGATTAT
GAGCCTGACTAAAACCGCCCCCGACTACCTGGTGGGCCAGCAGCCCGTGGAGGACATTTC
CAGCAATCGGATTTATAAAATCTTGGAACTGAACGGGTACGATCCCCAATATGCGGCTTC
CGTCTTTCTGGGATGGGCCACGAAAAAGTTCGGCAAGAGGAACACCATCTGGCTGTTTGG
GCCTGCAACTACCGGGAAGACCAACATCGCGGAGGCCATAGCCCACACTGTGCCCTTCTA
CGGGTGCGTAAACTGGACCAATGAGAACTTTCCTTTCAATGATTGCGTCGACAAGATGGT
GATCTGGTGGGAGGAGGGAAAGATGACCGCCAAGGTCGTGGAGTCGGCCAAAGCCATTCT
CGGAGGAAGCAAGGTGCGCGTGGACCAGAAATGCAAGTCCTCGGCCCAGATAGACCCGAC
TCCCGTGATCGTCACTTCAAACACCAACATGTGCGCCGTGATTGACGGGAACTCAACGAC
CTTCGAGCACCAGCAGCCGTTGCAAGACCGGATGTTCAAATTTGAACTCACCCGCCGTCT
GGATCATGACTTTGGGAAGGTCACCAAGCAGGAAGTGAAAGACTTTTTCCGGTGGGCAAA
GGATCACGTGGTTGAGGTGGAGCATGAATTCTACGTCAAAAAGGGTGGAGCCAAGAAAAG
ACCCGCCCCCAGTGACGCAGATATAAGTGAGCCCAAACGGGCGCGCGAGTCAGTTGCACA
GCCATCGACGTCAGACGCGGAAGCTTCGATCAACTACGCGGACAGGTACCAAAACAAATG
TTCTCGTCACGTGGGCATGAATCTGATGCTGTTTCCCTGCAGACAATGCGAGAGAATGAA
TCAGAATTCAAATATCTGCTTCACTCACGGACAGAAAGACTGTTTAGAGTGCTTTCCCGT
GTCAGAATCTCAACCCGTTTCTGTCGTCAAAAAGGCGTATCAGAAACTTTGCTACATTCA
TCATATCATGGGAAAGGTGCCAGACGCTTGCACTGCCTGCGATCTGGTCAATGTGGATTT
GGATGACTGCATCTCTGAACAATAAATGATTTAAATCAGGTATGGCTGCCGATGGTTATC
TTCCAGATTGGCTCGAGGACACTCTCTCTGAAGGAATAAGACAGTGGTGGAAGCTCAAAC
CTGGCCCACCACCACCAAAGCCCGCAGAGCGGCATAAGGACGACAGCAGGGGTCTTGTGC
TTCCTGGGTACAAGTACCTCGGACCCTTCAACGGACTCGACAAGGGAGAGCCGGTCAACG
AGGCAGACGCCGCGGCCCTCGAGCACGACAAGGCCTACGACCGGCAGCTCGACAGCGGAG
ACAACCCGTACCTCAAGTACAACCACGCCGACGCGGAGTTTCAGGAGCGCCTTAAAGAAG
ATACGTCTTTTGGGGGCAACCTCGGACGAGCAGTCTTCCAGGCGAAAAAGAGGGTTCTTG
AACCTCTGGGCCTGGTTGAGGAACCTGTTAAGACGGCTCCGGGAAAAAAGAGGCCGGTAG
AGCACTCTCCTGTGGAGCCAGACTCCTCCTCGGGAACCGGAAAAGCGGGCAACCAGCCTG
CAAGAAAAAGATTGAATTTTGGTCAGACTGGAGACGCAGACTCCGTACCTGACCCCCAGC
CTCTCGGACAACCACCAGCAGCCCCCTCTGGTCTGGGATCTACTACAATGGCTACAGGCA
GTGGCGCACCAGTGGCAGACAATAACGAGGGTGCCGATGGAGTGGGTAATTCCTCAGGAA
ATTGGCATTGCGATTCCCAATGGCTGGGCGACAGAGTCATCACCACCAGCACCCGAACCT
GGGCTCTGCCCACCTACAACAACCACCTCTACAAGCAAATCTCCAGCCAATCAGGAGCTT
CAAACGACAACCACTATTTTGGCTACAGCACCCCCTGGGGGTATTTTGACTTCAACAGAT
TCCACTGCCACTTTTCACCACGTGACTGGCAAAGACTCATCAACAACAACTGGGGATTCC
GACCCAAGAGACTCAACTTCAAGCTCTTTAACATTCAAGTCAAAGAGGTCACGCAGAATG
ACGGTACGACGACGATTGCCAATAACCTTACCAGCACGGTTCAGGTGTTTACTGACTCGG
AGTACCAGCTCCCGTACGTCCTCGGCTCGGCGCATCAAGGATGCCTCCCGCCGTTTCCAG
CGGACGTCTTCATGGTCCCACAGTATGGATACCTCACCCTGAACAACGGGAGTCAGGCGG
TAGGACGCTCTTCCTTTTACTGCCTGGAGTACTTTCCTTCTCAGATGCTGCGTACTGGAA
ACAACTTTCAGTTTAGCTACACCTTTGAAGACGTTCCTTTCCACAGCAGCTACGCTCACA
GCCAGAGTCTGGATCGGCTGATGAATCCTCTGATTGACCAGTACCTGTATTATCTAAACA
AGACACAATCAAATAGTGGAACTCTTCAACAGTCTCGGCTACTGTTTAGTCAAGCTGGAC
CCACCAGCATGTCTCTTCAAGCTAAAAACTGGCTGCCTGGACCTTGCTACAGACAGCAGC
GTCTGTCAAAGCAGGCAAACGACAACAACAACAGCAACTTTCCCTGGACTGCGGCTACAA
AGTATCATCTAAATGGCCGGGACTCGTTGGTTAATCCAGGACCAGCTATGGCCAGCCACA
AAGACGATGAAGAAAAGTTTTTCCCCATGCATGGAACCCTGATATTTGGTAAACAAGGAA
CAAATGCTAACGACGCGGATTTGGACAATGTCATGATTACAGATGAAGAAGAAATCCGCA
CCACCAATCCCGTGGCTACGGAGCAGTACGGATATGTGTCAAATAATTTGCAAAACTCAA
ATACTGGTCCAACTACTGGAACTGTCAATCACCAAGGAGCGTTACCTGGTATGGTGTGGC
AGGATCGAGACGTGTACCTGCAGGGACCCATTTGGGCCAAGATTCCTCACACCGATGGAC
ACTTTCATCCTTCTCCACTGATGGGAGGTTTTGGGCTCAAACACCCGCCTCCTCAGATCA
TGATCAAAAACACTCCCGTTCCAGCCAATCCTCCTACAAACTTCAGTTCTGCCAAGTTTG
CTTCTTTCATCACACAGTACTCCACGGGGCAGGTCAGCGTGGAGATCGAGTGGGAGCTGC
AGAAGGAGAACAGCAAACGCTGGAACCCCGAGATTCAGTACACTTCCAACTACAACAAAT
CTGTTAATGTGGACTTTACTGTGGACACTAATGGTGTGTATTCAGAGCCTCGCCCCATTG
GCACCAGATACCTGACTCGTAATCTGTAATTGCTTGTTAATCAATAAACCGTGTAATTCG
TTTCAGTTGAACTTTGGTCTCTGCGTACTTTTTTCTTATCTAGTTTCCATGGCTACGTAG
ATAAGTAGCATGGCGGGGTAATCATTAACTCTAAGGAACCCCTAGTGATGGAGTTGGCCA
CTCCCTCTCTGCGCGCTCGCTCGCTCACTGAGGCCGGGCGACCAAAGGTCGGGCGTCGCC
CGGGCTTTGCCCGGGCGGCCTCAGTGAGCGAGCGAGCGCGCAGAGAGGGAGTGGCCAA
SEQ ID NO: 113
>#976_AAV.FL.linear [organism = Adeno-associated virus][mol_type = genomic
DNA][isolation_source = liver tissue][topology = linear]
TTGGCCACTCCCTCTCTGCGCGCTCGCTCGCTCACTGAGGCCGGGCGACCAAAGGTCGCC
CGACGCCCGGGCTTTGCCCGGGCGGCCTCAGTGAGCGAGCGAGCGCGCAGAGAGGGAGTG
GCCAACTCCATCACTAGGGGTTCCTGGAGGGGTGGAGTCGTGACGTGAAGTACGTCATAG
GGTTAGGGAGGTCCTGTATTAGAGGTCACGTGAGTGTTTTGCGACATTTTGCGACACCAT
GTGGTCACGCTGGGTATTTAAGCCCGAGTGAGCACGCAGGGTCTCCATTTTGAAGCGGGA
GGTTTGAACGCGCAGCCGCCATGCCGGGATTTTACGAGATTGTGATTAAGGTCCCCAGCG
ACCTTGACGAGCATCTGCCCGGCATTTCTGACAGCTTTGTGAACTGGGTGGCCGAGAAGG
AATGGGAGTTGCCGCCAGATTCTGACATGGATTTGAATCTGATTGAGCAGGCACCCCTGA
CCGTGGCCGAGAAGCTGCAGCGCGACTTTCTGACGGAATGGCGCCGTGTGAGTAAGGCCC
CGGAGGCCCTCTTCTTTGTGCAATTTGAGAAGGGAGAGAGCTACTTCCACATGCACGTGC
TGGTGGAAACCACCGGGGTGAAATCTATGGTTTTGGGACGTTTCCTGAGTCAGATTCGCG
AAAAACTGATTCAGAGAATTTACCGCGGGATCGAGCCGACTTTGCCAAACTGGTTCGCGG
TCACAAAGACCCGAAATGGCGCCGGAGGCGGGAACAAGGTGGTGGATGAGTGCTACATCC
CCAATTACCTGCTCCCCAAAACCCAGCCTGAGCTCCAGTGGGCGTGGACTAATATGGAAC
AGTATTTAAGCGCCTGTTTGAATCTCGCGGAGCGTAAACGGTTGGTGGCGCAGCATCTGA
CGCATGTATCGCAGACGCAGGAGCAGAACAAAGAGAATCAGAATCCCAATTCTGACGCGC
CGGTGATCAGATCAAAAACCTCAGCCAGGTACATGGAGCTTGTCGGGTGGCTCGTGGATA
AGGGGATTACCTCGGAGAAGCAGTGGATCCAGGAGGACCAGGCCTCATACATCTCCTTCA
ATGCGGCCTCCAACTCGCGGTCGCAGATCAAGGCTGCTCTGGACAATGCGGGAAAGATCA
TGAGCCTGACTAAAACGGCCCCCGACTACCTGGTGGGCCAGCAACCCGTGGAGGACATTT
CCAGCAATCGGATTTATAAAATCTTGGAACTGAACGGGTATGATCCCCAATACGCGGCTT
CCGTCTTTCTGGGATGGGCTACGAAAAAGTTCGGCAAGAGGAACACCATCTGGCTGTTTG
GGCCTGCAACTACCGGGAAGACCAACATCGCGGAGGCTATAGCCCACACTGTGCCCTTTT
ACGGGTGCGTGAACTGGACCAATGAGAACTTTCCTTTCAACGATTGCGTCGACAAGATGG
TGATCTGGTGGGAGGAGGGGAAGATGACCGCCAAGGTCGTGGAGTCGGCCAAAGCCATTC
TCGGAGGAAGCAAGGTGCGCGTGGACCAGAAATGCAAGTCCTCGGCCCAGATAGACCCGA
CTCCCGTGATCGTCACCTCCAACACCAACATGTGCGCCGTGATTGACGGGAACTCAACGA
CCTTCGAACACCAGCAGCCGTTGCAAGACCGGATGTTCAAATTTGAACTCACCCGCCGTC
TGGATCATGACTTTGGGAAGGTCACCAAGCAGGAAGTCAAAGACTTTTTCCGGTGGGCAA
AGGATCACGTGGTTGAGGTGGAGCATGAATTCTACGTCAAAAAGGGTGGAGCCAAGAAAA
GACCCGCCCCCAGTGACGCAGATATAAGTGAGCCCAAACGGGTGCGCGAGTCAGTTGCGC
AGCCATCGACGTCAGACGCGGAAGCTTCGATCAACTACGCGGACAGGTACCAAAACAAAT
GTTCTCGTCACGTGGGCATGAATCTGATGCTGTTTCCCTGCAGACAATGCGAGAGAATGA
ATCAGAATTCAAATATCTGCTTCACTCACGGACAGAAAGACTGTTTAGAGTGCTTTCCCG
TGTCAGAATCTCAACCCGTTTCTGTCGTCAAAAAGGCGTATCAGAAACTGTGCTACATTC
ATCATATCATGGGAAAGGTGCCAGACGCTTGCACTGCCTGCGATCTGGTCAATGTGGATT
TGGATGACTGCATCTCTGAACAATAAATGATTTAAATCAGGTATGGCTGCCGATGGTTAT
CTTCCAGATTGGCTCGAGGACACTCTCTCTGAAGGAATAAGACAGTGGTGGAAGCTCAAA
CCTGGCCCACCACCACCAAAGCCCGCAGAGCGGCATAAGGACGACAGCAGGGGTCTTGTG
CTTCCTGGGTACAAGTACCTCGGACCCTTCAACGGACTCGACAAGGGAGAGCCGGTCAAC
GAGGCAGACGCCGCGGCCCTCGAGCACGACAAGGCCTACGACCGGCAGCTCGACAGCGGA
GACAACCCGTACCTCAAGTACAACCACGCCGACGCGGAGTTTCAGGAGCGCCTTAAAGAA
GATACGTCTTTTGGGGGCAACCTCGGACGAGCAGTCTTCCAGGCGAAAAAGAGGGTTCTT
GAACCTCTGGGCCTGGTTGAGGAACCTGTTAAGACGGCTCCGGGAAAAAAGAGGCCGGTA
GAGCACTCTCCTGTGGAGCCAGACTCCTCCTCGGGAACCGGAAAGGCGGGCCAGCAGCCT
GCAAGAAAAAGATTGAATTTTGGTCAGACTGGAGACGCAGACTCCGTACCTGACCCCCAG
CCTCTCGGACAGCCACCAGCAGCCCCCTCTGGTCTGGGATCTACTACAATGGCTACAGGC
AGTGGCGCACCAGTGGCAGACAATAACGAGGGTGCCGATGGAGTGGGTAATTCCTCAGGA
AATTGGCATTGCGATTCCCAATGGCTGGGCGACAGAGTCATCACCACCAGCACCCGAACC
TGGGCTCTGCCCACCTACAACAACCACCTCTACAAGCAAATCTCCAGCCAATCAGGAGCC
AGCAACGACAACCACTACTTTGGCTACAGCACCCCCTGGGGGTATTTTGACTTCAACAGA
TTCCACTGCCACTTTTCACCACGTGACTGGCAAAGACTCATCAACAACAACTGGGGATTC
CGGCCCAAGAGACTCAACTTCAAGCTCTTTAACATTCAAGTCAAAGAGGTCACGCAGAAT
GACGGTACGACGACGATTGCCAATAACCTTACCAGCACGGTTCAGGTGTTTACTGACTCG
GAGTACCAGCTCCCGTACGTCCTCGGCTCGGCGCATCAAGGATGCCTCCCGCCGTTCCCA
GCAGACGTCTTCATGGTCCCACAGTATGGATATCTCACCCTGAACAACGGGAGTCAGGCG
GTAGGACGCTCTTCCTTTTACTGCCTGGAGTACTTTCCTTCTCAGATGCTGCGTACTGGA
AACAACTTTCAGTTTAGCTACACCTTTGAAGACGTTCCTTTCCACAGCAGCTACGCTCAC
AGCCAGAGTCTGGATCGGCTGATGAATCCTCTGATCGACCAGTACCTGTATTATCTGAAC
AAGACACAATCAAATAGTGGAACTCTTCAGCAGTCTCGGCTACTGTTTAGCCAAGCTGGA
CCCACCAGCATGTCTCTTCAAGCTAAAAACTGGCTGCCTGGACCTTGCTACAGACAGCAG
CGTCTGTCAAAGCAGGCAAACGACAACAACAACAGCAACTTTCCCTGGACTGCGGCTACA
AAGTATCATCTAAATGGCCGGGACTCGTTGGTTAATCCAGGACCAGCTATGGCCAGCCAC
AAAGACGATGAAGAAAAGTTTTTCCCCATGCATGGAACCCTGATATTTGGTAAACAAGGA
ACAAATGCTAACGACGCGGATTTGGACAATGTCATGATTACAGATGAAGAAGAAATCCGC
ACCACCAATCCAGTGGCTACGGAGCAGTACGGATATGTGTCAAATAATTTGCAAAACTCA
AATACTGGTCCAACTACTGGAACTGTCAATCACCAAGGAGCGTTACCTGGTATGGTGTGG
CAGGATCGAGACGTGTACCTGCAGGGACCCATTTGGGCCAAGATTCCTCACACCGATGGA
CACTTTCATCCTTCTCCACTGATGGGAGGTTTTGGACTCAAACACCCACCTCCTCAGATC
ATGATCAAAAACACTCCCGTTCCAGCCAATCCTCCTACAAACTTCAGTTCTGCCAAGTTT
GCTTCTTTCATCACACAGTATTCCACGGGGCAGGTCAGCGTGGAGATCGAGTGGGAGCTG
CAGAAGGAGAACAGCAAACGCTGGAATCCCGAGATTCAGTACACTTCCAACTACAACAAA
TCTGTTAATGTGGACTTTACTGTGGACACTAATGGTGTGTATTCAGAGCCTCGCCCCATT
GGCACCAGATACCTGACTCGTAATCTGTAATTGCTTGTTAATCAATAAACCGTTTAATTC
GTTTCAGTTGAACTTTGGTCTCTGTGTGCTTCTTTCTTATCTAGTTTCCATGGCTACGTA
GATAAGTACCATGGCGGGTTAATCATTAACTCTAAGGAACCCCTAGTGATGGAGTTGGCC
ACTCCCTCTCTGCGCGCTCGCTCGCTCACTGAGGCCGGGCGACCAAAGGTCGCCCGACGC
CCGGGCTTTGCCCGGGCGGCCTCAGTGAGCGAGCGAGCGCGCAGAGAGGGAGTGGCCAA
SEQ ID NO: 114
>#1286_AAV.FL.linear [organism = Adeno-associated virus][mol_type = genomic
DNA][isolation_source = liver tissue][topology = linear]
TTGGCCACTCCCTCTCTGCGCGCTCGCTCGCTCACTGAGGCCGGGCGACCAAAGGTCGCC
CGACGCCCGGGCTTTGCCCGGGCGGCCTCAGTGAGCGAGCGAGCGCGCAGAGAGGGAGTG
GCCAACTCCATCACTAGGGGTTCCTGGAGGGGTGGAGTCGTGACGTGAATTACGTCATAG
GGTTAGGGAGGTCCTGTATTATAGGTCACGTGAGTGTTTTGCGACATTTTGCGACACCAT
GTGGTTACGCTGGGTATTTAAGCCCGAGTGAGCACGCAGGGTCTCCATTTTGAAGCGGGA
GGTTTGAACGCGCAGCCGCCATGCCGGGATTTTACGAGATTGTGATTAAGGTCCCCAGCG
ACCTTGACGAGCATCTGCCCGGCATTTCTGACAGCTTTGTGAACTGGGTGGCCGAGAAGG
AATGGGAGTTGCCGCCAGATTCTGACATGGATCTGAATCTGATTGAGCAGGCACCCCTGA
CCGTGGCCGAGAAGCTGCAGCGCGACTTTCTGACGGAGTGGCGCCGTGTGAGTAAGGCCC
CGGAGGCTCTTTTCTTTGTGCAATTTGAGAAGGGAGAGAGCTACTTCCACATGCACGTGC
TTGTGGAGACCACCGGGGTGAAATCCATGGTTTTGGGACGTTTCCTGAGTCAGATTCGCG
AAAAACTGATTCAGAGAATTTACCGCGGGATCGAGCCGACTTTGCCAAACTGGTTCGCGG
TCACAAAGACCCGAAATGGCGCCGGAGGCGGGAATAAGGTGGTGGATGAGTGCTACATCC
CCAATTACCTGCTCCCCAAAACCCAGCCTGAGCTCCAGTGGGCGTGGACTAATATGGAAC
AGTATTTAAGCGCCTGTTTGAATCTCGCGGAGCGTAAACGGTTGGTGGCGCAGCATCTGA
CGCACGTGTCGCAGACGCAGGAGCAGAACAAAGAGAATCAGAATCCCAATTCTGACGCGC
CGGTGATTAGATCAAAAACCTCAGCCAGGTACATGGAGCTGGTCGGGTGGCTCGTGGATA
AGGGGATTACCTCGGAGAAGCAGTGGATCCAGGAGGACCAGGCTTCATACATCTCCTTCA
ATGCGGCCTCCAACTCGCGGTCCCAGATCAAGGCTGCCTTGGACAATGCGGGAAAGATCA
TGAGCCTGACTAAAACCGCCCCCGACTACCTGGTGGGCCAGCAGCCCGTGGAGGACATTT
CCAGCAATCGGATTTATAAAATCTTGGAACTGAACGGATACGATCCCCATTACGCGGCTT
CCGTCTTTCTGGGATGGGCCACTAAAAAGTTCGGCAAGAGGAACACCATCTGGCTGTTTG
GGCCTGCAACTACCGGGAAGACCAACATCGCGGAGGCCATAGCCCACACTGTGCCCTTCT
ACGGGTGCGTAAACTGGACCAATGAGAACTTTCCGTTCAATGATTGCGTCGACAAGATGG
TGATTTGGTGGGAGGAGGGAAAGATGACCGCCAAGGTCGTGGAGTCGGCCAAAGCCATTC
TCGGCGGAAGCAAGGTGCGCGTGGACCAAAAGTGCAAGTCTTCGGCCCAGATCGACCCGA
CTCCCGTGATAGTCACCTCCAACACCAACATGTGCGCCGTGATTGACGGGAACTCAACGA
CCTTCGAACACCAGCAGCCGTTGCAAGACCGGATGTTCAAATTTGAACTCACCCGCCGTC
TGGATCATGACTTTGGGAAGGTCACCAAGCAGGAAGTCAAAGACTTTTTCCGGTGGGCAA
AGGATCACGTGGTTGAGGTGGAGCATGAATTCTACGTCAAAAAGGGTGGAGCCAAGAAAA
GACCCGCCCCCAGTGACGCAGATATAAGTGAGCCCAAACGGGCGCGCGAGTCAGTTGCGC
AGCCATCGACGTCAGACGCGGAAGCTTCGATCAACTACGCGGACAGGTACCAAAACAAAT
GTTCTCGTCACGTGGGCATGAATCTGATGCTGTTTCCCTGCAGACAATGCGAGAGAATGA
ATCAGAATTCAAATATCTGCTTCACTCACGGACAGAAAGACTGTTTAGAGTGCTTTCCCG
TGTCAGAATCTCAACCCGTTTCTGTCGTCAAAAAGGCGTATCAGAAACTGTGCTACATTC
ATCACATCATGGGAAAGGTGCCAGACGCTTGCACTGCTTGCGACCTGGTCAATGTGGACT
TGGATGACTGTGTTTCTGAACAATAAATGACTTAAACCAGGTATGGCTGCCGATGGTTAT
CTTCCAGATTGGCTCGAGGACACTCTCTCTGAAGGAATAAGACAGTGGTGGAAGCTCAAA
CCTGGCCCACCACCACCAAAGCCCGCAGAGCGGCATAAGGACGACAGCAGGGGTCTTGTG
CTTCCTGGGTACAAGTACCTCGGACCCTTCAACGGACTCGACAAGGGAGAGCCGGTCAAC
GAGGCAGACGCCGCGGCCCTCGAGCACGACAAGGCCTACGACCGGCAGCTCGACAGCGGA
GACAACCCGTACCTCAAGTACAACCACGCCGACGCGGAGTTTCAGGAGCGCCTTAAAGAA
GATACGTCTTTTGGGGGCAACCTCGGACGAGCAGTCTTCCAGGCGAAAAAGAGGGTTCTT
GAACCTCTGGGCCTGGTTGAGGAACCTGTTAAGACGGCTCCGGGAAAAAAGAGGCCGGTA
GAGCACTCTCCTGTGGAGCCAGACTCCTCCTCGGGAACCGGAAAAGCGGGCCAGCAGCCT
GCAAGAAAAAGATTGAATTTTGGTCAGACTGGAGACGCAGACTCCGTACCTGACCCCCAG
CCTCTCGGACAGCCACCAGCAGCCCCCTCTGGTTTGGGATCTACTACAATGGCTACAGGC
AGTGGCGCACCAGTGGCAGACAATAACGAGGGTGCCGATGGAGTGGGTAATTCCTCAGGA
AATTGGCATTGCGATTCCCAATGGCTGGGCGACAGAGTCATCACCACCAGCACCCGAACC
TGGGCTCTGCCCACCTACAACAACCACCTCTACAAGCAAATCTCCAGCCAATCAGGAGCC
AGCAACGACAACCACTACTTTGGCTACAGCACCCCCTGGGGGTATTTTGACTTCAACAGA
TTCCACTGCCACTTTTCACCACGTGACTGGCAAAGACTCATCAACAACAACTGGGGATTC
CGGCCCAAGAGACTCAACTTCAAGCTCTTTAACATTCAAGTCAAAGAGGTCACGCAGAAT
GACGGTACGACAACGATTGCCAATAACCTTACCAGCACGGTTCAGGTGTTTACTGACTCG
GAGTACCAGCTCCCGTACGTCCTCGGCTCGGCGCATCAAGGATGCCTCCCGCCGTTCCCA
GCAGACGTCTTCATGGTCCCACAGTATGGATACCTCACCCTGAACAACGGGAGTCAGGCA
GTAGGACGCTCTTCATTTTACTGCCTGGAGTACTTTCCTTCTCAGATGCTGCGTACTGGA
AACAACTTTCAGTTCAGCTACACCTTTGAAGACGTTCCTTTCCACAGCAGCTACGCTCAC
AGCCAGAGTCTGGATCGGCTGATGAATCCTCTGATCGACCAGTACCTGTATTATCTGAAC
AAAACACAATCAAATAGTGGAACTCTTCAGCAGTCTCGGCTACTGTTTAGTCAAGCTGGA
CCCACCAGCATGTCTCTTCAAGCTAAAAACTGGCTGCCTGGACCTTGCTACAGACAGCAG
CGTCTGTCAAAGCAGGCAAACGACAACAACAACAGCAACTTTCCCTGGACTGCGGCTACA
AAGTATCATCTAAATGGCCGGGACTCGTTGGTTAATCCAGGACCAGCTATGGCCAGCCAC
AAAGACGATGAAGAAAAGTTTTTCCCCATGCATGGAACCCTGATATTTGGTAAACAAGGA
ACAAATGCTAACGACGCGGATTTGGACAATGTTATGATTACAGATGAAGAAGAAATCCGC
ACCACCAATCCCGTGGCTACGGAGCAGTACGGATATGTGTCAAATAATTTGCAAAACTCA
AACACTGGTCCAACTACTGGAACTGTCAATCACCAAGGAGCGTTACCTGGTATGGTGTGG
CAGGATCGAGACGTGTACCTGCAGGGACCCATTTGGGCCAAGATTCCTCACACGGACGGA
CATTTTCATCCTTCTCCACTGATGGGAGGTTTTGGGCTCAAACACCCGCCTCCTCAGATC
ATGATCAAAAACACTCCCGTTCCAGCCAATCCTCCTACAAACTTCAGTTCTGCCAAGTTT
GCTTCTTTCATCACACAGTATTCCACGGGGCAGGTCAGCGTGGAGATCGAGTGGGAGCTA
CAGAAGGAGAACAGCAAACGCTGGAATCCCGAAATTCAGTATACTTCCAACTACAACAAA
TCTGTTAATGTGGACTTTACTGTGGACACTAATGGTGTGTATTCAGAGCCTCGCCCCATT
GGCACCAGATACCTGACTCGTAATCTGTAATTGCTTGTTAATCAATAAACCGTTTAATTC
GTTTCAGTTGAACTTTGGTCTCTGCGTACTTCTTTTCTTATCTAGTTTCCATGGCTACGT
AGATAAGTAGCATGGAGGGTTAATCATTAACTACAAGGAACCCCTAGTGATGGAGTTGGC
CACTCCCTCTCTGCGCGCTCGCTCGCTCACTGAGGCCGGGCGACCAAAGGTCGCCCGACG
CCCGGGCTTTGCCCGGGCGGCCTCAGTGAGCGAGCGAGCGCGCAGAGAGGGAGTGGCCAA
SEQ ID NO: 115
>#163_AAV.FL.linear [organism = Adeno-associated virus][mol_type = genomic
DNA][isolation_source = liver tissue][topology = linear]
TTGGCCACTCCCTCTCTGCGCGCTCGCTCGCTCACTGAGGCCGGGCGACCAAAGGTCGCC
CGACGCCCGGGCTTTGCCCGGGCGGCCTCAGTGAGCGAGCGAGCGCGCAGAGAGGGAGTG
GCCAACTCCATCACTAGGGGTTCCTGGAGGGGTGGAGTCGTGACGTGAATTACGTCATAG
GGTTAGGGAGGTCCTGTATTAGAGGTCACGTGAGTGTTTTGCGACATTTTGCGACACCAT
GTGGTCACGCTGGGTATTTAAGCCCGAGTGAGCACGCAGGGTCTCCATTTTGAAGCGGGA
GGTTTGAACGCGCAGCCGCCATGCCGGGATTTTACGAGATTGTGATTAAGGTCCCCAGCG
ACCTTGACGAGCATCTGCCCGGCATTTCTGACAGCTTTGTGAACTGGGTGGCCGAGAAGG
AATGGGAGTTGCCGCCAGATTCTGACATGGATCTGAATCTGATTGAGCAGGCACCCCTGA
CCGTGGCCGAGAAGCTGCAGCGCGACTTTCTGACGGAGTGGCGCCGTGTGAGTAAGGCCC
CGGAGGCCCTTTTCTTTGTGCAATTTGAGAAGGGAGAGAGCTACTTCCACATGCACGTGC
TTGTGGAGACCACCGGGGTGAAATCCATGGTTTTGGGACGTTTCCTGAGTCAGATTCGCG
AAAAACTGATTCAGAGAATTTACCGCGGAATCGAGCCGACTTTGCCAAACTGGTTCGCGG
TCACAAAGACCAGAAATGGCGCCGGAGGCGGGAACAAGGTGGTGGATGAGTGCTACATCC
CCAATTACCTGCTCCCCAAAACCCAGCCTGAGCTCCAGTGGGCGTGGACTAATATGGAAC
AGTATTTAAGCGCCTGTTTGAATCTCGCGGAGCGTAAACGGTTGGTGGCGCAGCATCTGA
CGCACGTGTCGCAGACTCAGGAGCAGAACAAGGAGAATCAGAATCCCAATTCTGACGCGC
CGGTGATCAGATCAAAAACCTCAGCCAGGTACATGGAGCTGGTCGGGTGGCTCGTGGATA
AGGGGATTACGTCGGAGAAGCAGTGGATCCAGGAGGACCAGGCTTCATACATCTCCTTCA
ATGCGGCCTCCAACTCGCGGTCCCAAATCAAGGCTGCTCTGGACAATGCGGGAAAGATCA
TGAGCCTGACTAAAACCGCTCCCGACTACCTGGTGGGCCAGCAGCCCGTGGAGGACATTT
CCAGCAATCGGATTTATAAAATCTTGGAACTGAACGGGTACGACCCCCAATACGCGGCTT
CCGTCTTTCTGGGATGGGCCACGAAAAAGTTCGGCAAGAGGAACACCATCTGGCTGTTTG
GGCCTGCAACTACCGGGAAGACCAACATCGCGGAGGCCATAGCCCACACTGTGCCCTTCT
ACGGGTGCGTAAACTGGACCAATGAGAACTTTCCTTTCAATGATTGCGTCGACAAGATGG
TGATCTGGTGGGAGGAGGGGAAGATGACCGCCAAGGTCGTGGAGTCGGCCAAAGCCATTC
TCGGAGGAAGCAAGGTGCGCGTGGACCAGAAATGCAAGTCCTCGGCCCAGATAGACCCGA
CTCCCGTGATCGTCACCTCCAACACCAACATGTGCGCCGTGATTGACGGGAACTCAACGA
CCTTCGAGCACCAGCAGCCGTTGCAAGACCGGATGTTCAAATTTGAACTCACCCGCCGTC
TGGATCATGACTTTGGGAAGGTCACCAAGCAGGAAGTCAAAGACTTTTTCCGGTGGGCAA
AGGATCATGTGGTTGAGGTGGAGCATGAATTCTACGTCAAAAAGGGTGGAGCCAAGAAAA
GACCCGCCCCCAGTGACGCAGATATAAGTGAGCCCAAACGGGCGCGCGAGTCAGTTGCGC
AGCCATCGACGTCAGAAGCGGAAGCTTCGATCAACTACGCGGACAGGTACCAAAACAAAT
GTTCTCGTCACGTGGGCATGAATCTGATGCTGTTTCCCTGCAGACAATGCGAAAGAATGA
ATCAGAATTCAAATATCTGCTTCACTCACGGACAGAAAGACTGTTTAGAGTGCTTTCCCG
TGTCAGAATCTCAACCCGTTTCTGTCGTCAAAAAGGCGTATCAGAAACTTTGCTACATTC
ATCATATCATGGGAAAGGTGCCAGACGCTTGCACTGCCTGCGATCTGGTCAATGTGGATT
TGGATGACTGCATCTCTGAACAATAAATGATTTAAATCAGGTATGGCTGCCGATGGTTAT
CTTCCAGATTGGCTCGAGGACACTCTCTCTGAAGGAATAAGACAGTGGTGGAAGCTCAAA
CCTGGCCCACCACCACCAAAGCCCGCAGAGCGGCATAAGGACGACAGCAGGGGTCTTGTG
CTTCCTGGGTACAAGTACCTCGGACCCTTCAACGGACTCGACAAGGGAGAGCCGGTCAAC
GAGGCAGACGCCGCGGCCCTCGAGCACGACAAGGCCTACGACCGGCAGCTCGACAGCGGA
GACAACCCGTACCTCAAGTACAACCACGCCGACGCGGAGTTTCAGGAGCGCCTTAAAGAA
GATACGTCTTTTGGGGGCAACCTCGGACGAGCAGTCTTCCAGGCGAAAAAGAGGGTTCTT
GAACCTCTGGGCCTGGTTGAGGAACCTGTTAAGACGGCTCCGGGAAAAAAGAGGCCGGTA
GAGCACTCTCCTGTGGAGCCAGACTCCTCCTCGGGAACCGGAAAAGCGGGCCAGCAGCCT
GCAAGAAAAAGATTGAATTTTGGTCAGACTGGAGACGCAGACTCCGTACCTGACCCCCAG
CCTCTCGGACAGCCACCAGCAGCCCCCTCTGGTTTGGGATCTACTACAATGGCTACAGGC
AGTGGCGCACCAGTGGCAGACAATAACGAGGGTGCCGATGGAGTGGGTAATTCCTCAGGA
AATTGGCATTGCGATTCCCAATGGCTGGGCGACAGAGTCATCACCACCAGCACCCGAACC
TGGGCCCTGCCCACCTACAACAACCACCTCTACAAGCAAATCTCCAGCCAATCAGGAGCT
TCAAACGACAACCACTACTTTGGCTACAGCACCCCCTGGGGGTATTTTGACTTCAACAGA
TTCCACTGCCACTTTTCACCACGTGACTGGCAAAGACTCATCAACAACAACTGGGGATTC
CGACCCAAGAAACTCAACTTCAAGCTCTTTAACATTCAAGTCAAAGAGGTCACGCAGAAT
GACGGTACGACGACGATTGCCAATAACCTTACCAGCACGGTTCAGGTGTTTACTGACTCG
GAGTACCAGCTCCCGTACGTCCTCGGCTCGGCGCATCAAGGATGCCTCCCGCCGTTTCCA
GCGGACGTCTTCATGGTCCCACAGTATGGATACCTCACCCTGAACAACGGGAGTCAGGCG
GTAGGACGCTCTTCCTTTTACTGCCTGGAGTACTTTCCTTCTCAGATGCTGCGTACTGGA
AACAACTTTCAGTTCAGCTACACCTTTGAAGACGTTCCTTTCCACAGCAGCTACGCTCAC
AGCCAGAGTCTGGATCGGCTGATGAATCCTCTGATTGACCAGTACCTGTATTATCTGAAC
AAGACACAATCAAATAGTGGAACTCTTCAGCAGTCTCGGCTACTGTTTAGTCAAGCTGGA
CCCACCAGCATGTCTCTTCAAGCTAAAAACTGGCTGCCTGGACCTTGCTACAGACAGCAG
CGTCTGTCAAAGCAGGCAAACGACAACAACAACAGCAACTTTCCCTGGACTGCGGCTACA
AAGTATCATCTAAATGGCCGGGACTCGTTGGTTAATCCAGGACCAGCTATGGCCAGCCAC
AAAGACGATGAAGAAAAGTTTTTCCCCATGCATGGAACCCTGATATTTGGTAAACAAGGA
ACAAATGCTAACGACGCGGATTTGGACAATGTCATGATTACAGATGAAGAAGAAATCCGC
ACCACCAATCCCGTGGCTACGGAGCAGTACGGATATGTCTCAAATAATTTGCAAAACTCA
AATACTGGTCCAACTACTGGAACTGTAAATCACCAAGGAGCGTTACCTGGTATGGTGTGG
CAGGATCGAGACGTGTACCTGCAGGGACCCATTTGGGCCAAGATTCCTCACACCGATGGA
CACTTTCATCCTTCTCCACTGATGGGAGGTTTTGGACTCAAACACCCGCCTCCTCAGATC
ATGATCAAAAACACTCCCGTTCCAGCCAATCCTCCCACAAACTTCAGTTCTGCCAAGTTT
GCTTCTTTCATCACACAGTATTCCACGGGGCAGGTCAGCGTGGAGATCGAGTGGGAGCTG
CAGAAGGAGAACAGCAAACGCTGGAATCCCGAGATTCAGTACACTTCCAACTACAACAAA
TCTGTTAATGTGGACTTTACTGTGGACACTAATGGTGTGTATTCAGAGCCTCGCCCCATT
GGCACCAGATACCTGACTCGCAATCTGTAATTGCTTGTTAATCAATAAACCGTTTGATTC
GTTTCAGTTGAACTTTGGTCTCCGCGTACTTCTTTCTTATCTAGTTTCCATGGCTACGTA
GATAAGTAGCATGGCGGGTTAATCATTAACTACAAGGAACCCCTAGTGATGGAGTTGGCC
ACTCCCTCTCTGCGCGCTCGCTCGCTCACTGAGGCCGCCCGGGCAAACCTCTCTGCGCGC
TCGCTCTTTGCCCGGGCGGCCTCAGTGAGCGAGCGAGCGCGCAGAGAGGGAGTGGCCAA
SEQ ID NO: 116
>#685_AAV.FL.linear [organism = Adeno-associated virus][mol_type = genomic
DNA][isolation_source = liver tissue][topology = linear]
TTGGCCACTCCCTCTCTGCGCGCTCGCTCGCTCACTGAGGCCGGGCGACCAAAGGTCGCC
CGACGCCCGGGCTTTGCCCGGGCGGCCTCAGTGAGCGAGCGAGCGCGCAGAGAGGGAGTG
GCCAACTCCATCACTAGGGGTTCCTGGAGGGGTGGAGTCGTGACGTGAAGTACGTCATAG
GGTTAGGGAGGTCCTGTATTAGAGGTCACGTGAGTGTTTTGCGACATTTTGCGACACCAT
GTGGTTACGCAGGGTATTTAAGCCCGAGTGAGCACGCAGGGTCTCCATTTTAAAGCGGGA
GGTTTGAACACGCAGCCGCCATGCCGGGGTTTTACGAGATTGTGATTAAGGTCCCCAGCG
ACCTTGACGAGCATTTGCCCGGCATTTCTGACAGCTTTGTGAACTGGGTGGCCGAGAAGG
AATGGGAGTTGCCGCCAGATTCTGACATGGATCTGAATCTGATTGAGCAGGCACCCCTGA
CCGTGGCCGAGAAGCTGCAGCGCGACTTTCTGACGGAGTGGCGCCGTGTGAGTAAGGCCC
CGGAGGCTCTTTTCTTTGTGCAATTTGAGAAGGGAGAGAGCTACTTCCACATGCACGTGC
TGGTGGAGACCACCGGGGTGAAATCCATGGTTTTGGGACGTTTCCTGAGTCAGATTCGCG
AAAAACTGATTCAGAGAATTTACCGCGGGATCGAGCCGACTTTGCCAAACTGGTTTGCGG
TCACAAAGACCCGAAATGGCGCCGGAGGCGGGAACAAGGTGGTGGATGAGTGCTACATCC
CCAATTACCTGCTCCCCAAAACCCAGCCTGAGCTCCAGTGGGCGTGGACTAATATGGAAC
AGTATTTAAGCGCCTGTTTGAATCTCGCGGAGCGTAAACGGTTGGTGGCGCAGCATCTGA
CGCACGTGTCGCAGACGCAGGAGCAGAACAAAGAGAATCAGAATCCCAATTCTGACGCGC
CGGTGATTAGATCAAAAACCTCAGCCAGGTACATGGAGCTGGTCGGGTGGCTCGTGGACA
AGGGGATTACCTCGGAGAAGCAGTGGATCCAGGAGGACCAGGCTTCATACATCTCCTTCA
ATGCGGCCTCCAACTCGCGGTCCCAGATCAAGGCTGCTCTGGACAATGCGGGAAAGATCA
TGAGCCTAACTAAAACCGCCCCCGACTACCTGGTGGGCCAGCAGCCCGTGGAGGACATTT
CCAGCAATCGGATTTATAAAATCTTGGAACTGAACGGGTACGATCCCCAATACGCGGCTT
CCGTCTTTCTGGGATGGGCTACGAAAAAGTTCGGCAAGAGGAACACCATCTGGCTGTTTG
GGCCTGCAACTACCGGGAAGACCAACATTGCGGAGGCTATAGCCCACACTGTGCCCTTCT
ACGGGTGCGTAAACTGGACCAATGAGAACTTTCCATTCAATGATTGCGTCGACAAGATGG
TGATCTGGTGGGAGGAGGGAAAGATGACCGCCAAGGTCGTGGAGTCGGCCAAAGCCATTC
TCGGAGGAAGCAAGGTGCGCGTGGACCAGAAATGCAAGTCCTCGGCCCAGATAGACCCGA
CTCCCGTGATCGTCACCTCCAACACCAACATGTGCGCCGTGATTGACGGGAACTCAACGA
CCTTCGAACACCAGCAGCCGTTGCAAGACCGGATGTTCAAATTTGAACTCACCCGCCGTC
TGGATCATGACTTTGGAAAGGTCACCAAGCAGGAAGTCAAAGACTTTTTCCGGTGGGCAA
AGGATCACGTGGTTGAGGTGGAGCATGAATTCTACGTCAAAAAGGGTGGAGCCAAGAAAA
GACCCGCCCCAAGTGACGCAGATATAAGTGAGCCCAAACGGGTGCGCGAGTCAGTTGCGC
AGCCATCGACGTCAGACGCGGAAGCTTCGATCAACTACGCGGACAGGTACCAAAACAAAT
GTTCTCGTCACGTGGGCATGAATCTGATGCTATTTCCCTGCAGACAATGCGAGAGAATGA
ATCAGAATTCAAATATTTGCTTCACTCACGGACAGAAAGACTGTTTAGAGTGCTTTCCCG
TGTCAGAATCTCAACCCGTTTCTGTCGTCAAAAAGGCATATCAGAAACTGTGCTACATTC
ATCATATCATGGGAAAGGTGCCAGACGCTTGCACTGCCTGCGATCTGGTCAATGTGGATT
TGGATGACTGTATCTCTGAACAATAAATGATTTAAATCAGGTATGGCTGCCGATGGTTAT
CTTCCAGATTGGCTCGAGGACACTCTCTCTGAAGGAATAAGACAGTGGTGGAAGCTCAAA
CCTGGCCCACCACCACCAAAGCCCGCAGAGCGGCATAAGGACGACAGCAGGGGTCTTGTG
CTTCCTGGGTACAAGTACCTCGGACCCTTCAACGGACTCGACAAGGGAGAGCCGGTCAAC
GAGGCAGACGCCGCGGCCCTCGAGCACGACAAGGCCTACGACCGGCAGCTCGACAGCGGA
GACAACCCGTACCTCAAGTACAACCACGCCGACGCGGAGTTTCAGGAGCGTCTTAAAGAA
GATACGTCTTTTGGGGGCAACCTCGGACGAGCAGTCTTCCAGGCGAAAAAGAGGGTTCTT
GAACCTCTGGGCCTGGTTGAGGAACCTGTTAAAACGGCTCCGGGAAAAAAGAGGCCGGTA
GAGCACTCTCCTGCGGAGCCAGACTCCTCCTCGGGAACCGGAAAAGCGGGCCAGCAGCCT
GCAAGAAAAAGATTGAATTTCGGTCAGACTGGAGACGCAGACTCCGTACCTGACCCCCAG
CCTCTCGGACAGCCACCAGCAGCCCCCTCTGGTTTGGGATCTACTACAATGGCTACAGGC
AGTGGCGCACCAATGGCAGACAATAACGAGGGTGCCGATGGAGTGGGTAATTCCTCAGGA
AATTGGCATTGCGATTCCCAATGGCTGGGCAACAGAGTCATCACCACCAGCACCCGAACC
TGGGCCCTGCCCACCTACAACAACCACCTCTACAAGCAAATTTCCAGCCAATCAGGAGCC
TCAAACGACAACCACTACTTTGGCTACAGCACCCCTTGGGGGTATTTTGACTTCAACAGA
TTCCACTGCCACTTTTCACCACGTGACTGGCAAAGACTCATCAACAACAACTGGGGATTC
CGGCCCAAAAGACTCAACTTCAAGCTCTTTAACATTCAAGTCAAAGAGGTCACGCAGAAT
GACGGTACGACGACGATTGCCAATAACCTTACCAGCACGGTTCAGGTGTTTACTGACTCG
GAGTACCAGCTCCCGTACGTCCTCGGCTCGGCGCATCAAGGATGCCTCCCGCCGTTCCCA
GCAGACGTCTTTATGGTCCCACAGTATGGATACCTCACCCTGAACAACGGGAGTCAGGCG
GTAGGACGCTCTTCCTTTTACTGCCTGGAGTACTTTCCTTCTCAGATGCTGCGTACTGGA
AACAACTTTCAGTTCAGCTACACCTTTGAAGACGTTCCTTTCCACAGCAGCTACGCTCAC
AGCCAGAGTCTGGATCGGCTGATGAATCCTCTGATCGACCAGTACCTGTATTATCTAAAC
AAGACACAATCAAATAGTGGAACTCTTCAGCAGTCTCGGCTACTGTTTAGCCAAGCTGGA
CCCACCAGCATGTCTCTTCAAGCTAAAAACTGGCTGCCTGGACCTTGCTACAGACAGCAG
CGTCTGTCAAAGCAGGCAAACGACAACAACAACAGCAACTTTCCCTGGACTGCGGCTACA
AAGTATCATCTAAATGGCCGGGACTCGTTGGTTAATCCAGGACCAGCTATGGCCAGCCAC
AAAGACGATGAAGAAAAGTTTTTCCCCATGCATGGAACCCTGATATTTGGTAAACAAGGA
ACAAATGCCAACGACGCGGATTTGGACAATGTCATGATTACAGATGAAGAAGAAATCCGC
ACCACCAATCCCGTGGCTACGGAGCAGTACGGATATGTGTCAAATAATTTGCAAAACTCA
AATACTGGTCCAACTACTGGAACTGTCAATCACCAAGGAGCGTTACCTGGTATGGTGTGG
CAGGATCGAGACGTGTACCTGCAGGGACCCATTTGGGCCAAGATTCCTCACACCGATGGA
CACTTTCATCCTTCTCCACTGATGGGAGGTTTTGGGCTCAAACACCCGCCTCCTCAGATC
ATGATCAAAAACACTCCCGTTCCAGCCAATCCTCCAACAAACTTCAGTTCTGCCAAGTTT
GCTTCTTTCATCACACAGTATTCCACGGGACAGGTCAGCGTGGAGATTGAGTGGGAGCTG
CAGAAGGAGAACAGCAAACGCTGGAATCCCGAGATTCAGTACACTTCCAACTACAACAAA
TCTGTTAATGTGGACTTTACTGTGGACACTAATGGTGTGTATTCAGAGCCTCGCCCCATT
GGCACCAGATACCTGACTCGTAATCTGTAATTGCTTGTTAATCAATAAACCGTTTAATTC
GTTTCAGTTGAACTTTGGTCTCCGCGTACTTCTTTTCTTATCTAGTTTCCATGGCTACGT
AGATAAGTAGCATGGTGGGTTTATCATTAACTATAAGGAACCCCTAGTGATGGAGTTGGC
CACTCCCTCTCTGCGCGCTCGCTCGCTCACTGAGGCCGCCCGGGCAAAGCCCGGGCGTCG
GGCGACCTTTGCCCGGGCGGCCTCAGTGAGCGAGCGAGCGCGCAGAGAGGGAGTGGCCAA
SEQ ID NO: 117
>#442_AAV.FL.linear [organism = Adeno-associated virus][mol_type = genomic
DNA][isolation_source = liver tissue][topology = linear]
TTGGCCACTCCCTCTCTGCGCGCTCGCTCGCTCACTGAGGCCGGGCGACCAAAGGTCGCC
CGACGCCCGGGCTTTGCCCGGGCGGCCTCAGTGAGCGAGCGAGCGCGCAGAGAGGGAGTG
GCCAACTCCATCACTAGGGGTTCCTGGAGGGGTGGAGTCGTGACGTGAAGTACGTCATAG
GGTTAGGGAGGTCCTGTATTAGAGGTCACGTGAGTGTTTTGCGACATTTTGCGACACCAT
GTGGTCACGCTGGGTATTTAAGCCCGAGTGAGCACGCAGGGTCTCCATTTTAAAGCGGGA
GGTTTGAACGGGCAGCCGCCATGCCGGGGTTTTACGAGATTGTGATTAAGGTCCCCAGCG
ACCTTGACGAGCATCTGCCCGGCATTTCTGACAGCTTTGTGCACTGGGTGGCCGAGAAGG
AATGGGAGTTGCCGCCAGATTCTGACATGAATCTGAATCTGATTGAGCAGGCACCCCTGA
CCGTGGCCGAGAAGCTGCAGCGCGACTTTCTGACGGAGTGGCGCCGCGTGAGTAAGGCCC
CGGAGGCCCTCTTCTTTGTGCAATTTGAGAAGGGAGAGAGCTACTTCCACATGCACGTGC
TGGTGGAGACCACCGGGGTGAAATCCATGGTTTTGGGACGTTTCCTGAGTCAGATTCGCG
AAAAACTGATTCAGAGAGTTTACCGCGGGATCGAGCCGACTTTGCCAAATTGGTTCGCGG
TCACAAAGACCCGAAATGGCGCCGGAGGCGGGAACAAGGTGGTGGATGAGTGCTACATCC
CCAATTACCTGCTCCCCAAAACCCAGCCTGAGCTCCAGTGGGCGTGGACTAATATGGAAC
AGTATTTAAGCGCCTGTTTGAATCTCGCGGAGCGTAAACGGTTGGTGGCGCAGCATCTGA
CGCACGTGTCGCAGACGCAGGAGCAGAACAAAGAGAATCAGAATCCCAATTCTGACGCAC
CGGTGATCAGATCAAAAACCTCAGCCAGGTACATGGAGCTGGTCGGGTGGCTCGTGGACA
AGGGGATTACCTCGGAGAAGCAGTGGATCCAGGAGGACCAGGCTTCATACATCTCCTTCA
ATGCGGCCTCCAACTCGCGGTCCCAAATCAAGGCTGCTCTGGACAATGCGGGAAAGATCA
TGAGCCTGACTAAAACCGCCCCAGACTACCTAGTGGGCCAGCAGCCCGTGGAGGACATTT
CCAGCAATCGGATTTATAAAATCTTGGAATTGAACGGGTACGATCCCCAATACGCGGCTT
CCGTCTTTCTGGGATGGGCCACGAAAAAGTTCGGCAAGAGGAACACCATCTGGCTGTTTG
GGCCTGCAACTACCGGGAAGACCAACATCGCGGAGGCTATAGCCCACACTGTGCCCTTCT
ACGGGTGCGTAAACTGGACCAATGAGAACTTTCCCTTCAACGACTGTGTCGACAAGATGG
TGATCTGGTGGGAGGAGGGGAAGATGACCGCCAAGGTCGTGGAGTCGGCCAAAGCCATTC
TCGGAGGAAGCAAGGTGCGCGTGGACCAGAAATGTAAGTCCTCGGCCCAGATAGACCCGA
CTCCCGTGATCGTCACCTCCAACACCAACATGTGCGCCGTGATTGACGGGAACTCAACGA
CCTTCGAACACCAGCAGCCGTTGCAAGACCGGATGTTCAAATTTGAACTCACCCGCCGTC
TGGATCATGACTTTGGGAAGGTCACCAAGCAGGAAGTCAAAGACTTTTTCCGGTGGGCAA
AGGATCACGTGGTTGAGGTGGAGCATGAATTCTACGTCAAAAAGGGTGGAGCCAAGAAAA
GACCCGCCCCCAGTGACGCAGATATAAGTGAGCCCAAACGGGCGCGCGAGTCAGTTGCGC
AGCCATCGACGTCAGACGCGGAAGCTTCGATCAACTACGCGGACAGGTACCAAAACAAAT
GTTCTCGTCACGTGGGCATGAATCTGATGCTGTTTCCCTGCAGACAATGCGAGAGAATGA
ATCAGAATTCAAATATCTGCTTCACTCACGGACAGAAAGACTGTTTAGAGTGCTTTCCCG
TGTCAGAATCTCAACCCGTTTCTGTCGTCAAAAAGGCGTATCAGAAACTTTGCTACATTC
ATCATATCATGGGAAAAGTGCCAGACGCTTGCAGTGCCTGCGATCTGGTCAATGTGGATT
TGGATGACTGCATCTCTGAACAATAAATGATTTAAATCAGGTATGGCTGCCGATGGTTAT
CTTCCAGATTGGCTCGAGGACACTCTCTCTGAAGGAATAAGACAGTGGTGGAAGCTTAAA
CCTGGCCCACCACCACCAAAGCCCGCAGAGCGGCATAAGGACGACAGCAGGGGTCTTGTG
CTTCCTGGGTACAAGTACCTCGGACCCTTCAACGGACTCGACAAGGGAGAGCCGGTCAAC
GAGGCAGACGCCGCGGCCCTCGAGCACGACAAGGCCTACGACCGGCAGCTCGACAGCGGA
GACAACCCGTACCTCAAGTACAACCACGCCGACGCGGAGTTTCAGGAGCGCCTTAAAGAA
GATACGTCTTTTGGGGGCAACCTCGGACGAGCAGTCTTCCAGGCGAAAAAGAGGGTTCTT
GAACCTCTGGGCCTGGTTGAGGAACCTGTTAAGACGGCTCCGGGAAAAAAGAGGCCGGTA
GAGCACTCTCCTGTGGAGCCAGACTCCTCCTCGGGAACCGGAAAAGCGGGCCAGCAGCCT
GCAAGAAAGAGATTGAATTTCGGTCAGACTGGAGACGCAGACTCCGTACCTGACCCCCAG
CCTCTCGGACAACCACCAGCAGCCCCCTCTGGTCTGGGATCTACTACAATGGCTACAGGC
AGTGGCGCACCAATGGCAGACAATAACGAGGGTGCCGATGGAGTGGGTAATTCCTCAGGA
AATTGGCATTGCGATTCCCAATGGCTGGGCGACAGAGTCATCACCACCAGCACCCGAACC
TGGGCCCTGCCCACCTACAACAACCACCTCTACAAGCAAATCTCCAGCCAATCAGGAGCC
TCAAACGACAACCACTACTTTGGCTACAGCACCCCCTGGGGGTATTTTGACTTCAACAGA
TTCCACTGCCACTTTTCACCACGTGACTGGCAAAGACTCATCAACAACAACTGGGGATTC
CGGCCCAAGAGACTCAACTTCAAGCTCTTTAACATTCAAGTCAAAGAGGTCACGCAGAAT
GACGGTACGACGACGATTGCCAATAACCTTACCAGCACGGTTCAGGTGTTTACTGACTCG
GAGTACCAGCTCCCGTACGTCCTCGGCTCGGCGCATCAAGGATGCCTCCCGCCGTTCCCA
GCAGACGTTTTCATGGTCCCACAGTATGGATACCTCACCCTGAACAACGGGAGTCAGGCG
GTAGGACGCTCTTCCTTTTACTGCTTGGAGTACTTTCCTTCTCAGATGCTGCGTACTGGA
AACAACTTTCAGTTCAGCTACACCTTTGAAGACGTTCCTTTCCACAGCAGCTACGCTCAC
AGCCAGAGTCTGGATCGGCTGATGAATCCTCTGATCGACCAGTACCTGTATTATCTGAAC
AAGACACAATCAAATAGTGGAACACTTCAGCAGTCTCGGCTACTGTTTAGCCAAGCTGGA
CCCACCAGCATGTCTCTTCAAGCTAAAAATTGGCTGCCTGGACCTTGCTACAGACAGCAG
CGTCTGTCAAAGCAGGCAAACGACAACAACAACAGCAACTTTCCCTGGACTGCGGCTACA
AAGTATCATCTCAATGGCCGGGACTCGTTGGTTAATCCAGGACCAGCTATGGCCAGCCAC
AAAGATGATGAAGAAAAGTTTTTCCCCATGCATGGAACCCTGATATTTGGTAAACAAGGA
ACTGGAAGAGACAACGCGGATTTGGACAATGTCATGATTACAGATGAAGAAGAAATCCGC
ACCACCAATCCCGTGGCTACGGAGCAGTACGGATATGTGTCAAATAATTTGCAAAACTCA
AACACTGGTCCAACTACTGGAACTGTCAATCACCAAGGAGCGTTACCTGGTATGGTGTGG
CAGGATCGAGACGTGTACCTGCAGGGACCCATTTGGGCCAAGATTCCTCACACCGATGGA
CACTTTCATCCTTCTCCACTGATGGGAGGTTTTGGACTCAAACACCCACCTCCTCAGATC
ATGATTAAAAACACTCCCGTTCCAGCCAATCCTCCCACAAACTTCAGTTCTGCCAAGTTT
GCTTCTTTCATCACACAGTATTCCACGGGGCAGGTCAGCGTGGAGATCGAGTGGGAGCTG
CAGAAGGAGAACAGCAAACGCTGGAACCCCGAGATCCAGTACACTTCCAACTACAACAAA
TCTGTTAATGTGGACTTTACTGTGGACACTAATGGTGTGTATTCAGAGCCTCGCCCCATT
GGCACCAGATACCTGACTCGTAATCTGTAATTGCTTGTTAATCAATAAACCGTTTAATTC
GTTTCAGTTGAACTTTGGTCTCTGCGTACTTCTTTCTTATCTAGTTTCCATGGCTACGTA
GATAAGTAGCATGGCGGGTTAATCATTAACTACAAGGAACCCCTAGTGATGGAGTTGGCC
ACTCCCTCTCTGCGCGCTCGCTCGCTCACTGAGGCCGGGCGACCAAAGCCCGGGCGTCGG
GCGACCTTTGGTCGCCCGGCCTCAGTGAGCGAGCGAGCGCGCAGAGAGGGAGTGGCCAA
SEQ ID NO: 118
>#2320_AAV.FL.linear [organism = Adeno-associated virus][mol_type = genomic
DNA][isolation_source = liver tissue][topology = linear]
TTGGCCACTCCCTCTCTGCGCGCTCGCTCGCTCACTGAGGCCGGGCGACCAAAGGTCGCC
CGACGCCCGGGCTTTGCCCGGGCGGCCTCAGTGAGCGAGCGAGCGCGCAGAGAGGGAGTG
GCCAACTCCATCACTAGGGGTTCCTGGAGGGGTGGAGTCGTGACGTGAAGTACGTCATAG
GGTTAGGGAGGTCCTGTATTAGAGATCACGTGAGTGTTTTGCGACATTTTGCGACACCAT
GTGGTCACGCCGGTTAGTTAAGCTCGAGTGAGCACGCAGGGTCTCCATTTTGAAGCGGGA
AGTTTGAACGCGCAGCCGCCATGCCGGGGTTTTACGAGATTGTGATTAAGGTCCCCAGCG
ACCTTGACGAGCATCTGCCCGGCATTTCTGACAGCTTTGTGAACTGGGTGGCCGAGAAGG
AATGGGAGTTGCCGCCAGATTCTGACATGAATCTGAATCTGATTGAGCAGGCACCCCTGA
CCGTGGCCGAGAAGCTGCAGCGCGACTTTCTGACAGAATGGCGCCGCGTGAGTAAGGCCC
CGGAGGCCCTCTTCTTTGTGCAATTTGAGAAGGGAGAAAGCTATTTCCACATGCACGTGC
TGGTGGAAACCACCGGGGTGAAATCCATGGTTTTGGGACGTTTCCTGAGTCAGATTCGCG
AAAAACTGATTCAGAGAATTTACCGCGGGATCGAGCCGACTTTGCCAAATTGGTTCGCGG
TCACAAAGACCCGAAATGGCGCCGGAGGCGGGAACAAGGTGGTGGATGAGTGCTACATCC
CCAATTACCTGCTCCCCAAAACCCAGCCTGAGCTCCAGTGGGCGTGGACTAATATGGAAC
AGTATTTAAGCGCCTGTTTGAACCTCGCGGAGCGTAAACGGTTGGTGGCGCAGCATCTGA
CGCACGTGTCGCAGACCCAGGAGCAGAACAAAGAGAATCAGAATCCCAATTCTGACGCGC
CGGTGATTAGATCAAAAACCTCAGCCAGGTACATGGAGCTGGTCGGGTGGCTCGTGGATA
AGGGGATTACCTCGGAGAAGCAGTGGATCCAGGAGGACCAGGCTTCATACATCTCCTTCA
ATGCGGCCTCCAATTCGCGGTCCCAAATCAAGGCTGCTCTGGACAATGCGGGAAAGATCA
TGAGCCTGACTAAAACCGCCCCCGACTACCTGGTGGGCCAGCAGCCCGTGGAGGACATTT
CCGGCAATCGAATTTATAAAATCTTGGAACTGAATGGGTACGATCCCCAATACGCGGCTT
CCGTCTTTCTGGGATGGGCCACGAAAAAGTTCGGCAAGAGGAACACCATCTGGCTGTTTG
GGCCTGCAACTACCGGGAAGACCAACATCGCGGAAGCCATAGCCCACACGGTGCCCTTCT
ACGGGTGCGTAAACTGGACCAATGAGAACTTTCCCTTCAACGACTGTGTCGACAAGATGG
TGATCTGGTGGGAGGAGGGGAAGATGACCGCCAAGGTCGTGGAGTCGGCCAAAGCCATTC
TCGGAGGAAGCAAGGTGCGCGTGGACCAGAAATGTAAGTCCTCGGCCCAGATAGACCCGA
CTCCCGTGATCGTCACCTCCAACACCAACATGTGCGCCGTGATTGACGGGAACTCAACGA
CCTTCGAGCACCAGCAGCCGTTGCAAGACCGGATGTTCAAATTTGAACTTACCCGCCGTC
TGGATCATGACTTTGGGAAGGTCACCAAGCAGGAAGTGAAAGACTTTTTCCGGTGGGCAA
AGGATCACGTGGTTGAGGTGGAGCATGAATTCTACGTCAAAAAGGGTGGAGCTAAGAAAA
GGCCCGCCCCCAGTGACGCAGATATAAGTGAGCCCAAACGGGCGCGCGAGTCAGTTGCGC
AGCCATCGACGTCAGACGCGGAAGCTTCAATCAACTACGCGGACAGGTACCAAAACAAAT
GTTCTCGTCACGTGGGCATGAATCTGATGCTGTTTCCCTGCAGACAATGCGAGAGAATGA
ATCAGAATTCAAATATCTGCTTCACTCACGGACAGAAAGACTGTTTAGAGTGCTTTCCCG
TGTCAGAATCTCAACCCGTTTCTGTCGTCAAAAAGGCGTATCAGAAACTTTGCTACATTC
ATCATATCATGGGAAAGGTACCAGACGCTTGCACTGCTTGCGACCTGGTCAATGTGGATT
TGGATGACTGCATCTCTGAACAATAAATGATTTAAATCAGGTATGGCTGCCGATGGTTAT
CTTCCAGATTGGCTCGAGGACACTCTCTCTGAAGGAATAAGACAGTGGTGGAAGCTYAAA
CCTGGCCCACCACCACCAAAGCCCGCAGAGCGGCATAAGGACGACAGCAGGGGTCTTGTG
CTTCCTGGGTACAAGTACCTCGGACCCTTCAACGGACTCGACAAGGGAGAGCCGGTCAAC
GAGGCAGACGCCGCGGCCCTCGAGCACGACAAGGCCTACGACCGGCAGCTCGACAGCGGA
GACAACCCGTACCTCAAGTACAACCACGCCGACGCGGAGTTTCAGGAGCGTCTTAAAGAA
GATACGTCTTTTGGGGGCAACCTCGGACGAGCAGTCTTCCAGGCGAAAAAGAGGGTTCTT
GAAACTCTGGGCCTGGTTGAGGAACATGTTAAGACGGCTCCGGGTAAAAAGAGGGCGGTA
GAGCATGCTCATGTGGAGCCAGACTCCTCCTCGGGAACCGGAAAGGCGGGCCAGCAGCCT
GCAAGAAAAAGATTGAATTTTGGTCAGACTGGAGACGCAGACTCCGTACCTGACCCCCAG
CCTCTCGGACAGCCACCAGCAGCCCCCTYTGGTYTGGGATCTACTACAATGGCTTCAGGC
AGTGGCGCACCAATGGCAGACAATAACGAGGGTGCCGATGGAGTGGGTAATTCCTCAGGA
AATTGGCATTGCGATTCCCAATGGCTGGGCGACAGAGTCATCACCACCAGCACCCGAACC
TGGGCCCTGCCCACCTACAACAACCACCTCTACAAGCAAATCTCCAGCCAATCAGGAGCT
TCAAACGACAACCACTACTTTGGCTACAGCACCCCCTGGGGGTATTTTGACTTCAACAGA
TTCCACTGCCACTTTTCACCACGTGACTGGCAAAGACTCATCAACAACAACTGGGGATTC
CGACCCAAAAGACTCAACTTCAAGCTCTTTAACATTCAAGTCAAGGAGGTCACGCAGAAT
GACGGTACGACGACGATTGCCAATAACCTTACCAGCACGGTTCAGGTGTTTACTGACTCG
GAGTACCAGCTCCCGTACGTCCTCGGCTCGGCGCATCAAGGATGCCTCCCGCCGTTTCCA
GCGGACGTCTTCATGGTCCCACAGTATGGATACCTCACCCTGAACAACGGGAGTCAGGCG
GTAGGACGCTCTTCCTTTTACTGCCTGGAGTACTTTCCTTCTCAAATGCTGCGTACTGGA
AACAACTTTCAGTTCAGCTACACCTTTGAAGACGTTCCTTTCCACAGCAGCTACGCTCAC
AGCCAGAGTCTGGATCGGCTGATGAATCCTCTGATTGACCAGTACCTGTATTATCTGAAC
AAGACACAATCAAATAGTGGAACTCTTCAGCAGTCTCGGCTACTGTTTAGTCAAGCTGGA
CCCACCAGCATGTCTCTTCAAGCTAAAAACTGGCTGCCTGGACCTTGCTACAGACAGCAG
CGTCTGTCAAAGCAGGCAACGGATAACAACAACAGTGAATTTCCCTGGACTGCGGCTACA
AAGTATCATCTCAATGGCCGGGACTCGTTGGTTAATCCAGGACCAGCTATGGCCAGCCAC
AAAGACGATGAAGAAAAGTTTTTCCCCATGCATGGAACCCTGATATTTGGTAAACAAGGA
ACTAAATGCAACGACGCGGATTTGGACAATGTTATGATTACAGATGAAGAAGAAATCCGC
ACCACCAATCCCGTGGCTACGGAGCAGTACGGATATGTGTCAAATAATTTGCAAAACTCA
AATACTGGTCCAACTACTGGAACTGTCAATCACCAAGGAGCGTTACCTGGTATGGTGTGG
CAGGATCGAGACGTGTACCTGCAGGGACCCATTTGGGCCAAGATTCCTCACACCGATGGA
CACTTTCATCCTTCTCCACTGATGGGAGGTTTTGGACTCAAACACCCACCTCCTCAGATC
ATGATCAAAAACACTCCCGTTCCAGCCAATCCTCCCACAAACTTTAGTTCTGCCAAGTTT
GCTTCTTTCATCACACAGTATTCCACGGGGCAAGTCAGCGTGGAGATCGAGTGGGAGCTG
CAGAAGGAGAACAGCAAACGCTGGAACCCCGAGATCCAGTACACTTCCAACTACAACAAG
TCTGTTAATGTGGACTTTACTGTGGACACTAATGGCGTGTATTCAGAGCCTCGCCCCATT
GGCACCAGATACCTGACTCGTAATCTGTAATTGCTTGTTAATCAATAAACCGTGTAATTC
GTTTCAGTTGAACTTTGGTCTCCGCGTACTTCTTTTTCTTATCTAGTTTCCATGGCTACG
TAGATAAGTAGCATGGCGGGTGAATCATTAACTACAAGGAACCCCTAGTGATGGAGTTGG
CCACTCCCTCTCTGCGCGCTCGCTCGCTCACTGAGGCCGGGCGACCAAAGGTCGCCCGAC
GCCCGGGCTTTGCCCGGGCGGCCTCAGTGAGCGAGCGAGCGCGCAGAGAGGGAGTGGCCA
A
SEQ ID NO: 119
>#1055_AAV.FL.linear_Capsid sequence_ [organism = Adeno-associated virus]
[mol_type = genomic DNA][isolation_source = liver tissue][topology = linear]
GGTATGGCTGCCGATGGTTATCTTCCAGATTGGCTCGAGGACACTCTCTCTGAAGGAATA
AGACAGTGGTGGAAGCTCAAACCTGGCCCACCACCACCAAAGCCCGCAGAGCGGCATAAG
GACGACAGCAGGGGTCTTGTGCTTCCTGGGTACAAGTACCTCGGACCCTTCAACGGACTC
GACAAGGGAGAGCCGGTCAACGAGGCAGACGCCGCGGCCCTCGAGCACGACAAAGCCTAC
GACCGGCAGCTCGACAGCGGAGACAACCCGTACCTCAAGTACAACCACGCCGACGCGGAG
TTTCAGGAGCGCCTTAAAGAAGATACGTCTTTTGGGGGCAACCTCGGACGAGCAGTCTTC
CAGGCGAAAAAGAGGGTTCTTGAACCTCTGGGCCTGGTTGAGGAACCTGTTAAGACGGCT
CCGGGAAAAAAGAGGCCGGTAGAGCACTCTCCTGTGGAGCCAGACTCCTCCTCGGGAACC
GGAAAGGCGGGCCAGCAGCCTGCAAGAAAAAGATTGAATTTTGGTCAGACTGGACCTTAT
GCTTCCGTACCTGACCCCCAGCCTCTCGGACAGCCACCAGCAGCCCCCTCTGGTCTGGGA
ACTAATACGATGGCTACAGGCAGTGGCGCACCAATGGCAGACAATAACGAGGGCGCCGAC
GGAGTGGGTAATTCCTCGGGAAATTGGCATTGCGATTCCACATGGATGGGCGACAGAGTC
ATCACCACCAGCACCCGCACCTGGGCTCTGCCCACCTACAACAACCATCTGTACAAGCAG
ATTTCCAGCCAGTCTGGAGCCAGCAACGACAACCACTACTTTGGCTACAGCACCCCCTGG
GGGTATTTTGACTTCAACAGATTCCACTGCCACTTTTCGCCACGCGACTGGCAGAGACTC
ATCAACAACAACTGGGGATTCCGGCCCAAAAGACTCAACTTCAAGCTGTTTAACATTCAA
GTCAAGGAGGTCACGCAGAATGACGGTACGACGACGATTGCCAATAACCTTACCAGCACG
GTTCAGGTGTTTACTGACTCGGAGTACCAGCTCCCGTACGTCCTCGGCTCGGCGCATCAA
GGATGCCTCCCGCCGTTCCCAGCAGACGTCTTCATGGTGCCACAGTATGGATACCTCACC
CTGAACAACGGGAGTCAGGCGGTCGGACGCTCTTCCTTTTACTGCCTGGAGTACTTTCCT
TCTCAGATGCTTCGTACAGGAAACAACTTTACCTTCAGCTACACCTTTGAAGACGTTCCT
TTCCACAGCAGCTACGCTCACAGCCAGAGTCTGGACCGTCTCATGAATCCTCTCATCGAC
CAGTACCTGTATTACTTGAGCAGAACAAACACGCCGAGCGGAACCACCACGCAGTCCAGG
CTTCAGTTTTCTCAGGCCGGAGCGAGTGACATTCGGGACCAGTCTAGGAACTGGCTTCCT
GGACCCTGTTACCGCCAGCAGCGAGTATCAAAGACAGCTGCGGATAACAACAACAGTGAA
TACTCGTGGACTGGAGCTACCAAGTACCACCTCAATGGCAGAGACTCTTTGGTGAATCCG
GGCCCGGCCATGGCCAGCCACAAGGACGATGAAGAAAAGTTTTTTCCTCAAAGCGGGGTT
CTCATCTTTGGGAAGCAAGGCTCAGAGAAAACAAATGTGGACATTGAAAAGGTCATGATT
ACAGACGAAGAGGAAATCAGGACCACCAATCCCGTGGCTACGGAGCAGTATGGTGCTGTA
TCTACCAACCTCCAGAGCGGCAACACACAAGCAGCTACCTCAGATGTCAACACACAAGGC
GTTCTTCCAGGCATGGTCTGGCAGGACAGAGACGTGTACCTGCAGGGGCCCATCTGGGCA
AAGATTCCACACACGGACGGACATTTTCACCCCTCTCCCCTCATGGGCGGATTTGGACTG
AAGCACCCTCCTCCACAGATTCTCATTAAGAATACCCCAGTACCTGCGAATCCTTCTACC
ACTTTCAGCGCGGCAAAGTTTGCTTCCTTCATCACACAGTATTCCACGGGGCAGGTCAGC
GTGGAGATCGAATGGGAGCTGCAAAAGGAGAACAGCAAACGCTGGAATCCCGAAATTCAG
TACACTTCAAACTACAACAAATCTGTTAATGTGGACTTTACTGTGGACACTAATGGTGTG
TATTCAGAGCCTCGCCCCATTGGCACCAGATACCTGACTCGTAATCTGTAATTGCTTGTT
AATCAATAAACCGTGTAATTCGTTTCAGTTGAACTTTGGTCTCTGCGTACTTCTTTCTTA
TCTAGTTTCCATGGCTACGTAGATAAGTAGCATGGCGGGTTAATCATTAACACAAGGAAC
CCCTAGTGATGGAGTTGGCCACTCCCTCTCTGCGCGCTCGCTCGCTCACTGAGGCCGGGC
GACCAAAGGTCGCCCGACGCCCGGGCTTTGCCCGGGCGGCCTCAGTGAGCGAGCGAGCGC
GCAGAGAGGGAGTGGCCAA
SEQ ID NO: 120
>#M258_AAV.FL.linear_Capsid sequence_ [organism = Adeno-associated virus]
[mol_type = genomic DNA][isolation_source = liver tissue][topology = linear]
TTTAAATCAGGTATGGCTGCCGATGGTTATCTTCCAGATTGGCTCGAGGACACTCTCTCT
GAAGGAATAAGACAGTGGTGGAAGCTCAAACCTGGCCCACCACCGCCAAAGCCCGCAGAG
CGGCATAAGGACGACAGCAGGGGTCTTGTGCTTCCTGGGTACAAGTACCTCGGACCCTTC
AACGGACTCGACAAGGGAGAGCCGGTCAACGAGGCAGACGCCGCGGCCCTCGAGCACGAC
AAGGCCTACGACCGGCAGCTCGACAGCGGAGACAACCCGTACCTCAAGTACAACCACGCC
GACGCGGAGTTTCAGGAGCGCCTTAAAGAAGATACGTCTTTTGGGGGCAACCTCGGACGA
GCAGTCTTCCAGGCAAAAAAGAGGGTTCTTGAACCTCTGGGCCTGGTTGAGGAGCCTGTT
AAGACGGCTCCGGGAAAAAAGAGGCCGGTAGAGCACTCTCCTGCGGAGCCAGACTCCTCC
TCGGGAACCGGAAAAGCGGGCAACCAGCCTGCAAGAAAAAGATTGAATTTCGGTCAGACT
GGAGACGCAGACTCCGTACCTGACCCCCAGCCTCTCGGAGAACCACCAGCAGCCCCCACA
AGTTTGGGATCTACTACAATGGCTTCAGGCGGTGGCGCACCAGTGGCAGACAATAACGAG
GGTGCCGATGGAGTGGGTAATTCCTCGGGGAAATTGGCATTGCGATTCCCAATGGCTGGG
CGACAGAGTCATTACCACCAGCACCCGAACCTGGGCCCTGCCCACCTACAACAACCATCT
GTACAAGCAAATTTCCAGCCAATCAGGAGCCAGCAACGACAACCACTAATCTTGGCTCAC
TGCAACCCCTGGGGGTATTTTGACTTCAACAGATTCCACTGCCACTTTTCACCACGTGAC
TGGCAAAGACTCATCAACAACAACTGGGGATTCCGGCCCAAAAGACTCAACTTCAAGCTC
TTTAACATTCAAGTCAAAGAGGTCACGCAGAATGACGGTACGACGACGATTGCCAATAAC
CTTACCAGCACGGTTCAGGTGTTTACTGACTCGGAGTACCAGATCCCGTACGTCCTCGGC
TCGGCGCATCAAGGATGCCTCCCGCCGTTCCCAGCAGACGTCTTCATGGTGCCACAGTAT
GGATACCTCACCCTGAACAACGGGAGTCAGGCGGTAGGACGCTCTTCCTTTTACTGCTTG
GAGTACTTTCCTTCTCAGATGCTGCGTACTGGAAACAACTTCCAATTCAGCTACACCTTT
GAAGACGTTCCTTTCCACAGCAGCTACGCTCACAGCCAGAGTCTGGATCGGCTGATGAAT
CCTCTGATCGACCAGTACCTGTATTATCTGAACAAGACACAATCAGCCAGTGGAACTGTT
CAGCAGTCTCGGCTACTGTTTAGCCAAGCTGGACCCACCAGCATGTCTCTTCAAGCTAAA
AACTGGCTGCCTGGACCTTGCTACAGACAGCAGCGTCTGTCAAAGCAGGCAAACGAAAAC
AACAACAGCAACTTTCCCTGGACTGCGGCTACAAAGTATCATCTCAATGGCCGGGACTCG
TTGGTTAATCCAGGACCAGCTATGGCCAGTCACAAGGATGACGAAGAAAAGTTTTTCCCC
ATGCATGGAACCCTGATATTTGGTAAACAAGGAACTGGAAGAGACAACGCGGATTTGGAC
AATGTCATGATTACAGATGAAGAAGAAATCCGCACCACCAATCCCGTGGCTACGGAGCAG
TACGGATATGTGTCAAATAATTTGCAAAACTCAAACACTGCTCCGAGTACTGGAACTGTC
AATCACCAAGGAGCGTTACCTGGTATGGTGTGGCAGGATAGAGACGTGTACCTGCAGGGA
CCCATTTGGGCCAAGATTCCTCACACCGATGGACACTTTCATCCTTCTCCGCTGATGGGA
GGTTTTGGACTCAAACACCCACCTCCTCAGATCATGATCAAAAACACTCCCGTTCCAGCC
AATCCTCCTACAAACTTCAGTGCGGCAAAATTTGCTTCCTTTATCACACAGTATTCCACG
GGACAGGTCAGCGTGGAGATCGAGTGGGAGCTGCAGAAGGAGAACAGCAAACGCTGGAAC
CCCGAGATCCAGTACACTTCCAACTACAACAAGTCTGTTAATGTGGACTTTACTGTGGAC
ACTAATGGTGTGTATTCAGAGCCTCGCCCCATTGGCACCAGATACCTGACTCGTAATCTG
TAATTGCTTGTTAATCAATAAACCGTTTAATTCGTTTCAGTTGAACTTTGGTCTCTGCGT
ACTTCTTTTCTTATCTAGTTTCCATGGCTACGTAGATAAGTAGCATGGCGGGTTAATCAT
TAACTCTAAGGAACCCCTAGTGATGGAGTTGGCCACTCCCTCTCTGCGCGCTCGCYMSCY
SMCTSWGSCYSKSAAA
SEQ ID NO: 122
>>consensus AAV2
atggctgccgatggttatcttccagattggctcgaggacactctctctgaaggaataagacagtggtggaagct
caaacctggcccaccaccaccaaagcccgcagagcggcataaggacgacagcaggggtcttgtgcttcctgggt
acaagtacctcggacccttcaacggactcgacaagggagagccggtcaacgaggcagacgccgcggccctcgag
cacgacaaggcctacgaccggcagctcgacagcggagacaacccgtacctcaagtacaaccacgccgacgcgga
gtttcaggagcgccttaaagaagatacgtcttttgggggcaacctcggacgagcagtcttccaggcgaaaaaga
gggttcttgaacctctgggcctggttgaggaacctgttaagacggctccgggaaaaaagaggccggtagagcac
tctcctgcggagccagactcctcctcgggaaccggaaaagcgggccaccagcctgcaagaaaaagattgaattt
cggtcagactggagacgcagactccgtacctgacccccagcctctcggacagccaccagcagccccctctggtc
tgggaactaatacgatggctacaggcagtggcgcaccaatggcagacaataacgagggcgccgacggagtgggt
aattcctcgggaaattggcattgcgattccacatggatgggcgacagagtcatcaccaccagcacccgaacctg
ggctctgcccacctacaacaaccatctgtacaagcagatttccagccaatcaggagcctcaaacgacaaccact
actttggctacagcaccccctgggggtattttgacttcaacagattccactgccacttttcaccacgtgactgg
caaagactcatcaacaacaactggggattccgacccaagagactcaacttcaagctctttaacattcaagtcaa
agaggtcacgcagaatgacggtacgacgacgattgccaataaccttaccagcacggttcaggtgtttactgact
cggagtaccagctcccgtacgtcctcggctcggcgcatcaaggatgcctcccgccgttcccagcagacgtcttc
atggtgccacagtatggatacctcaccctgaacaacgggagtcaggcagtaggacgctcttcattttactgcct
ggagtactttccttctcagatgctgcgtaccggaaacaactttaccttcagctacacctttgaggacgttcctt
tccacagcagctacgctcacagccagagtttggaccgtctcatgaatcctctcatcgaccagtacctgtattac
ttgagcagaacaaacactccaagcggaaccaccacgcagtccaggcttcagttttctcaggccggagcgagtga
cattcgggaccagtctaggaactggcttcctggaccctgttaccgccagcagcgagtatcaaagacagctgcgg
ataacaacaacagtgaatactcgtggactggagctaccaagtaccacctcaatggcagagactctctggtgaat
ccgggcccggccatggccagccacaaggacgatgaagaaaagttttttcctcagagcggggttctcatctttgg
gaagcaaggctcagagaaaacaaatgtggacattgaaaaggtcatgattacagacgaagaggaaatcaggacca
ccaatcccgtggctacggagcagtatggttctgtatctaccaacctccagagcggcaacacacaagcagctacc
tcagatgtcaacacacaaggcgttcttccaggcatggtctggcaggacagagacgtgtacctgcaggggcccat
ctgggcaaagattccacacacggacggacattttcacccctctcccctcatgggcggatttggacttaaacacc
ctcctccgcagattctcatcaagaacaccccggtacctgcgaatccttcgaccaccttcagtgcggcaaagttt
gcttccttcatcacacagtactccacggggcaggtcagcgtggagatcgagtgggagctgcagaaggagaacag
caaacgctggaatcccgagatccagtacacttccaactacaacaaatctgttaatgtggactttactgtggaca
ctaatggtgtgtattcagagcctcgccccattggcaccagatacctgactcgtaatctgtaa

[0052] AAV Comprising a Capsid Protein of the Present Invention:

[0053] A further object of the present invention relates to an adeno-associated virus (AAV) that comprises at least one capsid protein of the present invention.

[0054] In some embodiments, the AAV is a wildtype AAV. In some embodiments, the AAV comprises a genome sequence as set forth in SEQ ID NO: 62-120.

[0055] A further object of the present invention relates to an AAV wherein the amino acid sequence of VP1 capsid protein is encoded by the nucleotides 2203-4410 of in SEQ ID NO: 85 (i.e. capsid #3013), SEQ ID NO: 68 (i.e. capsid #2087), SEQ ID NO: 79 (i.e. capsid #1449), SEQ ID NO: 69 (i.e. capsid #2206), SEQ ID NO: 71 (i.e. capsid #1534), SEQ ID NO: 115 (i.e. capsid #163), SEQ ID NO: 82 (i.e. capsid #1343), SEQ ID NO: 112 (i.e. capsid #790), SEQ ID NO:65 (i.e. capsid #1017), SEQ ID NO: 70 (i.e. capsid #877), SEQ ID NO: 67 (i.e. capsid #1273), SEQ ID NO: 62 (i.e. capsid #2497); SEQ ID NO: 119 (i.e. capsid #1055); SEQ ID NO: 73 (i.e. capsid #1919), SEQ ID NO:63, SEQ ID NO:64; SEQ ID NO:66, SEQ ID NO: 72, SEQ ID NO: 74, SEQ ID NO: 75, SEQ ID NO: 76, SEQ ID NO: 77, SEQ ID NO: 78, SEQ ID NO:80, SEQ ID NO:81, SEQ ID NO:83, SEQ ID NO:84, SEQ ID NO:86, SEQ ID NO:87; SEQ ID NO:88; SEQ ID NO:89; SEQ ID NO:90; SEQ ID NO: 91; SEQ ID NO:92; SEQ ID NO:93; SEQ ID NO:94; SEQ ID NO:95; SEQ ID NO:96; SEQ ID NO:97; SEQ ID NO:98, SEQ ID NO: 99; SEQ ID NO:100; SEQ ID NO:101; SEQ ID NO:102; SEQ ID NO:103, SEQ ID NO:104; SEQ ID NO:105, SEQ ID NO: 106; SEQ ID NO:107, SEQ ID NO:108, SEQ ID NO:109, SEQ ID NO: 110; SEQ ID NO:111, SEQ ID NO:113; SEQ ID NO:114; SEQ ID NO:116, SEQ ID NO: 117; SEQ ID NO:118 or SEQ ID NO:120; or, the amino acid sequence of VP2 capsid protein is encoded by nucleotides 2614-4410 of in SEQ ID NO: 85 (i.e. capsid #3013), SEQ ID NO: 68 (i.e. capsid #2087), SEQ ID NO: 79 (i.e. capsid #1449), SEQ ID NO: 69 (i.e. capsid #2206), SEQ ID NO: 71 (i.e. capsid #1534), SEQ ID NO: 115 (i.e. capsid #163), SEQ ID NO: 82 (i.e. capsid #1343), SEQ ID NO: 112 (i.e. capsid #790), SEQ ID NO:65 (i.e. capsid #1017), SEQ ID NO: 70 (i.e. capsid #877), SEQ ID NO: 67 (i.e. capsid #1273), SEQ ID NO: 62 (i.e. capsid #2497); SEQ ID NO: 119 (i.e. capsid #1055); SEQ ID NO: 73 (i.e. capsid #1919), SEQ ID NO:63, SEQ ID NO:64; SEQ ID NO:66, SEQ ID NO: 72, SEQ ID NO: 74, SEQ ID NO: 75, SEQ ID NO: 76, SEQ ID NO: 77, SEQ ID NO: 78, SEQ ID NO:80, SEQ ID NO:81, SEQ ID NO:83, SEQ ID NO:84, SEQ ID NO:86, SEQ ID NO:87; SEQ ID NO:88; SEQ ID NO:89; SEQ ID NO:90; SEQ ID NO: 91; SEQ ID NO:92; SEQ ID NO:93; SEQ ID NO:94; SEQ ID NO:95; SEQ ID NO:96; SEQ ID NO:97; SEQ ID NO:98, SEQ ID NO: 99; SEQ ID NO:100; SEQ ID NO:101; SEQ ID NO:102; SEQ ID NO:103, SEQ ID NO:104; SEQ ID NO:105, SEQ ID NO: 106; SEQ ID NO:107, SEQ ID NO:108, SEQ ID NO:109, SEQ ID NO: 110; SEQ ID NO:111, SEQ ID NO:113; SEQ ID NO:114; SEQ ID NO:116, SEQ ID NO: 117; SEQ ID NO:118 or SEQ ID NO:120 and the amino acid sequence of VP3 capsid protein is encoded by nucleotides 2809-4410 of in SEQ ID NO: 85 (i.e. capsid #3013), SEQ ID NO: 68 (i.e. capsid #2087), SEQ ID NO: 79 (i.e. capsid #1449), SEQ ID NO: 69 (i.e. capsid #2206), SEQ ID NO: 71 (i.e. capsid #1534), SEQ ID NO: 115 (i.e. capsid #163), SEQ ID NO: 82 (i.e. capsid #1343), SEQ ID NO: 112 (i.e. capsid #790), SEQ ID NO:65 (i.e. capsid #1017), SEQ ID NO: 70 (i.e. capsid #877), SEQ ID NO: 67 (i.e. capsid #1273), SEQ ID NO: 62 (i.e. capsid #2497); SEQ ID NO: 119 (i.e. capsid #1055); SEQ ID NO: 73 (i.e. capsid #1919), SEQ ID NO:63, SEQ ID NO:64; SEQ ID NO:66, SEQ ID NO: 72, SEQ ID NO: 74, SEQ ID NO: 75, SEQ ID NO: 76, SEQ ID NO: 77, SEQ ID NO: 78, SEQ ID NO:80, SEQ ID NO:81, SEQ ID NO:83, SEQ ID NO:84, SEQ ID NO:86, SEQ ID NO:87; SEQ ID NO:88; SEQ ID NO:89; SEQ ID NO:90; SEQ ID NO: 91; SEQ ID NO:92; SEQ ID NO:93; SEQ ID NO:94; SEQ ID NO:95; SEQ ID NO:96; SEQ ID NO:97; SEQ ID NO:98, SEQ ID NO: 99; SEQ ID NO:100; SEQ ID NO:101; SEQ ID NO:102; SEQ ID NO:103, SEQ ID NO:104; SEQ ID NO:105, SEQ ID NO: 106; SEQ ID NO:107, SEQ ID NO:108, SEQ ID NO:109, SEQ ID NO: 110; SEQ ID NO:111, SEQ ID NO:113; SEQ ID NO:114; SEQ ID NO:116, SEQ ID NO: 117; SEQ ID NO:118 or SEQ ID NO:120.

[0056] In some embodiments, the AAV of the present invention is a rAAV that comprises a heterologous nucleic acid comprising a transgene.

[0057] In some embodiments, the transgene encodes for a therapeutic protein. The term “therapeutic protein” refers to a protein which is defective or missing from the subject in question, thus resulting in a disease state or disorder in the subject, or to a protein which confers a benefit to the subject in question, such as an antiviral, antibacterial or antitumor function. A therapeutic protein can also be one which modifies any one of a wide variety of biological functions, such as endocrine, immunological and metabolic functions. Typically, the transgene may encode for a polypeptide involved in immune response, hematopoiesis, inflammation, cell growth and proliferation, cell lineage differentiation, or stress response.

[0058] In some embodiments, the transgene encodes for a site-specific endonuclease that provides for site-specific knock-down of gene function, e.g., where the endonuclease knocks out an allele associated with a disease. For example, where a dominant allele encodes a defective copy of a gene that, a site-specific endonuclease can be targeted to the defective allele and knock out the defective allele. In some embodiments, the rAAV of the present invention comprises a polynucleotide that encodes a site-specific endonuclease; and a polynucleotide that encodes a functional copy of a defective allele, where the functional copy encodes a functional protein. Site-specific endonucleases that are suitable for use include, e.g., zinc finger nucleases (ZFNs); transcription activator-like effector nucleases (TALENs), and CRISPR-associated endonuclease. As used herein, the term “CRISPR-associated endonuclease” has its general meaning in the art and refers to clustered regularly interspaced short palindromic repeats associated which are the segments of prokaryotic DNA containing short repetitions of base sequences. In particular, the CRISPR-associated endonuclease is Cas9 or a derivative thereof. The Cas9 nuclease can have a nucleotide sequence identical to the wild type Streptococcus pyrogenes sequence. Alternatively, the wild type Streptococcus pyrogenes Cas9 sequence can be modified. For instance, the Cas9 nuclease sequence can be for example, the sequence contained within a commercially available vector such as PX330 or PX260 from Addgene (Cambridge, Mass.). In some embodiments, the Cas9 endonuclease can have an amino acid sequence that is a variant or a fragment of any of the Cas9 endonuclease sequences of Genbank accession numbers KM099231.1 GL669193757; KM099232.1; GL669193761; or KM099233.1 GL669193765 or Cas9 amino acid sequence of PX330 or PX260 (Addgene, Cambridge, Mass.). The Cas9 nucleotide sequence can be modified to encode biologically active variants of Cas9, and these variants can have or can include, for example, an amino acid sequence that differs from a wild type Cas9 by virtue of containing one or more mutations (e.g., an addition, deletion, or substitution mutation or a combination of such mutations). For example the Cas9 nuclease can be mutated in the conserved FiNH and RuvC domains, which are involved in strand specific cleavage. For example, an aspartate-to-alanine (D10A) mutation in the RuvC catalytic domain allows the Cas9 nickase mutant (Cas9n) to nick rather than cleave DNA to yield single-stranded breaks, and the subsequent preferential repair through HDR can potentially decrease the frequency of unwanted indel mutations from off-target double-stranded breaks. In some embodiments, the rAAV of the present invention comprises one or more guide RNA. As used herein, the term “one or more guide RNA” refers to the RNAs that guide the insertion or deletion of residues. In the context of the invention, the guide RNA is used for recruiting Cas9 to specific genomic loci. In some embodiments, the guide RNA can be a sequence complementary to a coding or a non-coding sequence. In some embodiments, the subject is administered with a combination of at least one vectors comprising one polynucleotide encoding for a Cas9 endonuclease and at least one vector comprising the guide RNA.

[0059] In some embodiments, the transgene encodes for an interfering RNA (RNAi), in particular a siRNA. A “small interfering” or “short interfering RNA” or siRNA is a RNA duplex of nucleotides that is targeted to a gene interest (a “target gene”). An “RNA duplex” refers to the structure formed by the complementary pairing between two regions of a RNA molecule. siRNA is “targeted” to a gene in that the nucleotide sequence of the duplex portion of the siRNA is complementary to a nucleotide sequence of the targeted gene. In some embodiments, the length of the duplex of siRNAs is less than 30 nucleotides.

[0060] In some embodiments, the transgene encodes for an antisense oligonucleotide. As used herein, the term “antisense oligonucleotide” is understood to refer to a nucleotide sequence which is substantially complementary to a target nucleotide sequence in a pre-mRNA molecule, hnRNA (heterogenous nuclear RNA) or mRNA molecule. The degree of complementarity (or substantial complementarity) of the antisense sequence is preferably such that a molecule comprising the antisense sequence can form a stable hybrid with the target nucleotide sequence in the RNA molecule under physiological conditions.

[0061] Other transgenes of interest include, without limitation, synthetic long non-coding RNAs (SINEUPs; Carrieri et al., 2012, Nature 491: 454-7; Zucchelli et al., 2015, RNA Biol 12(8): 771-9; Indrieri et al., 2016, Sci Rep 6: 27315) and artificial microRNAs. Other specific transgene of interest useful in the practice of the present invention are described below.

[0062] In some embodiments, the transgene is operably linked to a constitutive promoter. In some embodiments the transgene is operably linked to an inducible promoter. In some embodiments, the transgene is operably linked to a tissue-specific or cell type-specific regulatory element.

[0063] Numerous methods are known in the art for production of rAAV vectors, including transfection, stable cell line production, and infectious hybrid virus production systems which include adenovirus-AAV hybrids, herpesvirus-AAV hybrids (Conway, J E et al., (1997) J. Virology 71(11):8780-8789) and baculovirus-AAV hybrids. rAAV production cultures for the production of rAAV virus particles all require; 1) suitable host cells, including, for example, human-derived cell lines such as HeLa, A549, or 293 cells, or insect-derived cell lines such as SF-9, in the case of baculovirus production systems; 2) suitable helper virus function, provided by wild-type or mutant adenovirus (such as temperature sensitive adenovirus), herpes virus, baculovirus, or a plasmid construct providing helper functions; 3) AAV rep and cap genes and gene products; 4) a transgene (such as a therapeutic transgene) flanked by at least one AAV ITR sequences; and 5) suitable media and media components to support rAAV production. Suitable media known in the art may be used for the production of rAAV vectors. These media include, without limitation, media produced by Hyclone Laboratories and JRH including Modified Eagle Medium (MEM), Dulbecco's Modified Eagle Medium (DMEM), custom formulations such as those described in U.S. Pat. No. 6,566,118, and Sf-900 II SFM media as described in U.S. Pat. No. 6,723,551, each of which is incorporated herein by reference in its entirety, particularly with respect to custom media formulations for use in production of recombinant AAV vectors. The rAAV particles can be produced using methods known in the art. See, e.g., U.S. Pat. Nos. 6,566,118; 6,989,264; and 6,995,006. In practicing the invention, host cells for producing rAAV particles include mammalian cells, insect cells, plant cells, microorganisms and yeast. Host cells can also be packaging cells in which the AAV rep and cap genes are stably maintained in the host cell or producer cells in which the AAV vector genome is stably maintained. Exemplary packaging and producer cells are derived from 293, A549 or HeLa cells. AAV vectors are purified and formulated using standard techniques known in the art.

[0064] In some embodiments, rAAV particles may be produced by a triple transfection method, such as the exemplary triple transfection method provided infra. Briefly, a plasmid containing a rep gene and a capsid gene, along with a helper adenoviral plasmid, may be transfected (e.g., using the calcium phosphate method) into a cell line (e.g., HEK-293 cells), and virus may be collected and optionally purified.

[0065] In some embodiments, rAAV particles may be produced by a producer cell line method, such as the exemplary producer cell line method provided infra (see also (referenced in Martin et al., (2013) Human Gene Therapy Methods 24:253-269). Briefly, a cell line (e.g., a HeLa cell line) may be stably transfected with a plasmid containing a rep gene, a capsid gene, and a promoter-transgene sequence. Cell lines may be screened to select a lead clone for rAAV production, which may then be expanded to a production bioreactor and infected with an adenovirus (e.g., a wild-type adenovirus) as helper to initiate rAAV production. Virus may subsequently be harvested, adenovirus may be inactivated (e.g., by heat) and/or removed, and the rAAV particles may be purified.

[0066] In some embodiments, a method is provided for producing any rAAV particle as disclosed herein comprising (a) culturing a host cell under a condition that rAAV particles are produced, wherein the host cell comprises (i) one or more AAV package genes, wherein each said AAV packaging gene encodes an AAV replication and/or encapsidation protein; (ii) a rAAV pro-vector comprising a transgene flanked by at least one AAV ITR, and (iii) an AAV helper function; and (b) recovering the rAAV particles produced by the host cell. rAAV vector particles of the invention may be harvested from rAAV production cultures by lysis of the host cells of the production culture or by harvest of the spent media from the production culture, provided the cells are cultured under conditions known in the art to cause release of rAAV particles into the media from intact cells, as described more fully in U.S. Pat. No. 6,566,118). Suitable methods of lysing cells are also known in the art and include for example multiple freeze/thaw cycles, sonication, microfluidization, and treatment with chemicals, such as detergents and/or proteases.

[0067] In some embodiments, the rAAV particles are purified. The term “purified” as used herein includes a preparation of rAAV particles devoid of at least some of the other components that may also be present where the rAAV particles naturally occur or are initially prepared from. Thus, for example, isolated rAAV particles may be prepared using a purification technique to enrich it from a source mixture, such as a culture lysate or production culture supernatant. Enrichment can be measured in a variety of ways, such as, for example, by the proportion of DNase-resistant particles (DRPs) or genome copies (gc) present in a solution, or by infectivity, or it can be measured in relation to a second, potentially interfering substance present in the source mixture, such as contaminants, including production culture contaminants or in-process contaminants, including helper virus, media components, and the like. rAAV particles may be isolated or purified using one or more of the following purification steps: equilibrium centrifugation; flow-through anionic exchange filtration; tangential flow filtration (TFF) for concentrating the rAAV particles; rAAV capture by apatite chromatography; heat inactivation of helper virus; rAAV capture by hydrophobic interaction chromatography; buffer exchange by size exclusion chromatography (SEC); nanofiltration; and rAAV capture by anionic exchange chromatography, cationic exchange chromatography, or affinity chromatography. These steps may be used alone, in various combinations, or in different orders. In some embodiments, the method comprises all the steps in the order as described below. Methods to purify rAAV particles are found, for example, in Xiao et al., (1998) Journal of Virology 72:2224-2232; U.S. Pat. Nos. 6,989,264 and 8,137,948; and WO 2010/148143.

[0068] Therapeutic Uses and Pharmaceutical Compositions:

[0069] The rAAV of the present invention are particularly suitable for delivering the transgene to a cell of interest. Accordingly, a further object of the present invention relates to a method of delivering a transgene to a cell comprising contacting the cell with an amount of a rAAV of the present invention.

[0070] In particular, the rAAV of the present invention are particularly suitable for gene therapy. Gene therapy consists in introducing in tissue of interest a functional copy of a transgene (e.g. a gene) that is deficient therein (gene replacement therapy), or by delivering to the tissue a transgene which will have a beneficial effect on the disease to be treated (symptomatic therapy). In some embodiments, the rAAV of the present invention is particularly suitable for delivering a transgene in liver.

[0071] Thus a further object of the present invention relates to a method for delivering a transgene to a tissue in a subject, the method comprising administering to the subject: an effective amount of a rAAV of the present invention.

[0072] More specifically, the present invention provides a method of therapy in a patient in need thereof, comprising administering to the patient a therapeutically effective amount of a rAAV of the present invention.

[0073] A further object of the present invention relates to a pharmaceutical composition comprising the rAAV of the present invention with pharmaceutically acceptable excipients, and optionally sustained-release matrices, such as biodegradable polymers. The pharmaceutical composition of the present invention thus comprises a pharmaceutically acceptable excipient, carrier, buffer, stabiliser or other materials well known to those skilled in the art. A pharmaceutically acceptable carrier or excipient refers to a non-toxic solid, semi-solid or liquid filler, diluent, encapsulating material or formulation auxiliary of any type. Such materials should be non-toxic and should not interfere with the efficacy of the active ingredient (i.e. the rAAV of the present invention of the invention). The precise nature of the carrier or other material may be determined by the skilled person according to the route of administration, i.e. here subretinal injection. The pharmaceutical composition is typically in liquid form. Liquid pharmaceutical compositions generally include a liquid carrier such as water, petroleum, animal or vegetable oils, mineral oil or synthetic oil. Physiological saline solution, magnesium chloride, dextrose or other saccharide solution or glycols such as ethylene glycol, propylene glycol or polyethylene glycol may be included. For injection, the active ingredient will be in the form of an aqueous solution, which is pyrogen-free and has suitable pH, isotonicity and stability. Those of relevant skill in the art are well able to prepare suitable solutions using, for example, isotonic vehicles such as Sodium Chloride Injection, Ringer's Injection, Lactated Ringer's Injection. Preservatives, stabilisers, buffers, antioxidants and/or other additives may be included, as required. For delayed release, the rAAV of the present invention may be included in a pharmaceutical composition, which is formulated for slow release, such as in microcapsules formed from biocompatible polymers or in liposomal carrier systems according to methods known in the art. Typically, the pharmaceutical composition of the present invention is supplied in a prefilled syringe. A “ready-to-use syringe” or “prefilled syringe” is a syringe which is supplied in a filled state, i.e. the pharmaceutical composition to be administered is already present in the syringe and ready for administration. Prefilled syringes have many benefits compared to separately provided syringe and vial, such as improved convenience, affordability, accuracy, sterility, and safety. The use of prefilled syringes results in greater dose precision, in a reduction of the potential for needle sticks injuries that can occur while drawing medication from vials, in pre-measured dosage reducing dosing errors due to the need to reconstituting and/or drawing medication into a syringe, and in less overfilling of the syringe helping to reduce costs by minimising drug waste. In some embodiments the pH of the liquid pharmaceutical composition of the present invention is in the range of 5.0 to 7.0, 5.1 to 6.9, 5.2 to 6.8, 5.3 to 6.7 or 5.4 to 6.6.

[0074] The invention will be further illustrated by the following figures and examples. However, these examples and figures should not be interpreted in any way as limiting the scope of the present invention.

### FIGURES

[0075] FIG. 1. AAV Full-length sequences in 57 human liver tissues. A) Location of the two open reading frames encoding replication proteins (Rep78, Rep68, Rep52 and Rep40), structural proteins (VP1, VP2 and VP3) and AAP protein coding by AAV genome. Promoters (p5, p19 and p40) are indicated with arrows. B) Amino acid variations compared to the reference AAV2 are indicated. The triangles indicate genome location of specific AAV2/13 (top) or AAV2 (middle) variants in the series of 57 human liver AAV isolates. Common variants shared by both genotypes are shown (bottom). Grey and black colors refer to silent and missense AAV variants, respectively; numbers correspond to wild-type AAV2 nucleotide sequence coordinates (NC_001401).

[0076] FIG. 2. All new capsids detarget the liver in this mouse model

[0077] Luciferase activity of controls and new capsids capsids. Each column represents the average of activity in at least 3 mice expressed as fold change versus AAV2. Standard deviations are displayed. On the right, the phylogenetic tree of the VP1 amino acid sequences was constructed using the Neighbor-Joining method. The evolutionary distances were computed using the Poisson correction method and are in the units of the number of amino acid substitutions per site.

[0078] FIG. 3. The new capsids efficiently target the muscles

[0079] A-C). Luciferase activity of controls and new capsids. Each column represents the average of activity in at least 3 mice expressed as fold change versus AAV2. Standard deviations are displayed. Statistical analysis on fold change was performed using one-way ANOVA. Dunnett's multiple comparison test was used to compare the mean of each capsid with the mean of the controls (* versus PBS, # versus AAV2 and $ versus AAV*). *, #, $=p<0.05; **, ##, $$=p<0.01; ***, ###, $$$=p<0.001.

### EXAMPLE 1: ADENO-ASSOCIATED VIRUS IN THE LIVER: NATURAL HISTORY

[0080] Results:

[0081] Identification of Two Major AAV Genotypes in the Liver

[0082] We screened frozen liver tissues from 1,319 patients for the presence of AAV viral DNA with 6 Taqman probes distributed along the genome that collectively recognize all known AAV genotypes 1 to 13. We identified AAV DNA in 18% of non-tumor liver tissues (n=233), 82 of which were further analyzed by viral capture with 120-mer oligonucleotide probes covering the entire genome of all known AAV genotypes (350 probes/genotype). After sequencing, a complete coverage of the viral genome was obtained in 57 samples, which allowed to reconstruct full-length AAV sequences (FIG. 1A). These sequences revealed two major AAV subtypes. The first subtype (n=25) is highly similar to AAV2 reference sequence (NC_001401) also corresponding to VP1 Clade B genotype isolated in human^{14, 43} (data not shown). The second subtype (n=32), here named AAV2/13, showed hybrid sequences including various parts of the AAV13 capsid and c-ter in the context of an AAV2 5′part (FIG. 1B). VP1 sequences of this subtype corresponded to various pieces of AAV13 and were previously termed Clade C (data not shown).^{14, 43} We identified several variants shared by both AAV subtypes, but different from the AAV2 reference NC_001401, corresponding mostly to positions common in AAV2, AAV3 or AAV13, silent at the protein level (n=42, 87.5%) and distributed along the viral genome (FIG. 1B). In contrast, several nucleotide variants leading to amino acid substitutions in AAV2/13 sequences were located in the hypervariable regions (HVRs) 5, 6 7 and 10 and originated from AAV13 sequence (FIG. 1B). By screening the overall series of 1,319 samples with two probes specific of AAV2/13 subtype and located in the CAP2 region (data not shown), we determined the AAV genotype in 143 samples and identified an equal number of the two AAV subtypes (47.6% AAV2 and 52.4% AAV2/13 genotypes).

[0083] AAV Infection and Episomal Form

[0084] In the 233 liver samples positive for AAV DNA, quantification of AAV followed a bimodal distribution with 97% of the tissues showing a low number of copy/cell (ranging from 4.6e-05 to 0.04) and only 8 patients with higher quantity of AAV ranging from 0.07 to 0.18 copy/cell (data not shown). Relationship between AAV detection, clinical and histological features of the patients showed that AAV was significantly enriched in female (p<0.001), young patients (p=0.016) and occurred more frequently in a background of non-fibrotic liver (p<0.001; data not shown).

[0085] In 64/233 (27.5%) of the tissues positive for AAV, all the genomic AAV regions were amplified suggesting the presence of the entire viral genome. In order to experimentally search for episomal AAV form, we designed a DNAse/TaqMan based assay (data not shown) which allowed to detected episomal AAV in 60 patients, corresponding to 26% of AAV positive samples and 4.5% of all patients. Using in silico analyses of the AAV capture sequencing, among the 57 cases with a complete reconstructed AAV genomic sequence, we identified 14 cases with 3′ITR-5′ITR junctions without clonal insertion. The 3′ITR-5′ITR junctions showed various sequences presenting a double-D ITR structure, in flip or flop configuration, with a 125 bp deletion confirmed by Sanger sequencing (data not shown).

[0086] AAV Transcription is Associated with Episomal Form

[0087] Then, we screened for AAV RNA expression in 101 non-tumor liver tissues positive for AAV by qRT-PCR. AAV transcript was identified in 64% of the tested liver tissues. We showed that either AAV REP or CAP expression were enriched in liver tissues with episomal form (p<0.001) and both transcripts were more frequently associated in presence of episomal than not-episomal AAV form (p=0.022), defining a population of patients with an “episomal-expressed AAV” (data not shown). A higher AAV copies per cell was identified in liver tissues with episomal-expressed AAV, supporting the hypothesis of a viral active infection in these liver samples (data not shown). Episomal AAV were also more frequent in female (p<0.001) and non-cirrhotic patients (p<0.001; data not shown). Analysis of AAV positivity in function of age showed a peak of frequency at 25% in the 30-40 years class. AAV episomal form was more frequent in young patients (<40 years old) reaching the highest frequency level in the twenties (data not shown). These results suggest that AAV active infection is more frequent in the second and third decade during life, while inactive not-episomal forms subsist after the primary infection.

[0088] Discussion:

[0089] In this study, we provided a comprehensive description at large scale of wild type AAV infection in the liver and of its oncogenic consequences in human. Despite the large number of studies available on recombinant AAV vectors (rAAV), the natural history of wild type AAV infection is still poorly understood. Here, we provided an extensive characterization of the different AAV viral forms in the largest series of tumor and non-tumor liver tissues to better understand the AAV infection in human.

[0090] The prevalence of AAV was observed in 21% of patients in non-tumor and/or tumor liver in agreement with the seroprevalence of antibody against AAV identified in 40 to 80% of the general population.¹⁰⁻¹² Our result showed that half of the patients demonstrate persistent AAV DNA in the liver during life, mainly in the population of young and female patients without liver fibrosis. However, since most of our liver tissues were sampled from patients with liver diseases, the exact prevalence of AAV DNA in the liver of healthy individuals remains to be evaluated.

[0091] Two major AAV genotypes, AAV2 and hybrids AAV2/13, were identified in our cohort. The classification of AAV viruses is currently based on their serological response and on the amino acid sequence of the VP1 region defined by Gao and colleagues.¹⁴ However, this classification in viral clades does not include all the AAV serotypes and the most recently isolated viral clones from non-human primates.^{16, 46} Moreover, most of the sequences isolated from human tissues were restricted to VP1 region, in particular only one full-length AAV sequence from clade C was publicly available.⁴³ Here, we provided the whole AAV genome sequences of 57 human clones classified with half of them belonging to the reference AAV2 sequence, whereas the others were hybrids between AAV2 in the 5′part and AAV13 in the 3′ corresponding to the previous clade C of the VP1 classification. Our work dramatically increased the number human AAV full-length sequences publicly available enlightening the genotypes and genomic variants associated with an efficient natural AAV infection of the liver.

[0092] In conclusion, these findings are important to understand wild type AAV biology. Our data are particularly relevant considering the large usage of AAV vector in liver-targeted gene therapy.

### EXAMPLE 2: PRODUCTION, IN VITRO AND IN VIVO TESTING OF NATURAL VARIANTS IDENTIFIED

[0093] Material and Methods

[0094] Plasmid Construction for New Serotypes

[0095] To construct the plasmid containing AAV2 Rep sequence and the new Cap genes, the capsid sequences were synthesized (GENEWIZ). The fragment was inserted in the plasmid pAAV2 which contains AAV2 Rep and AAV2 Cap in order to replace the AAV2 Cap with the corresponding new Cap sequence.

[0096] AAV Production

[0097] HEK293T cells were grown in suspension in 50 mL of serum-free medium. The cells were transfected with 3 plasmids: i) a transgene plasmid, containing AAV2 ITRs flanking an expression cassette ii) the helper plasmid pXX6, containing adenoviral sequences necessary for AAV production, and iii) a plasmid containing AAV Rep and Cap genes, defining the serotype of AAV. Two days after transfection, the cells were lysed to release the AAV particles.

[0098] The viral lysate was purified by affinity chromatography. Viral genomes were quantified by a TaqMan real-time PCR assay using primers and probes corresponding to the ITRs of the AAV vector genome (Rohr et al., J. Virol. Methods, 2002, 106, 81-88).

[0099] In Vivo Studies

[0100] All mouse studies were performed according to the French and European legislation on animal care and experimentation (2010/63/EU) and approved by the local institutional ethical committee (protocol no. 2016-002C). AAV vectors were administered intravenously via the tail vein to 6 weeks old male C57B16/J mice. PBS-injected littermates were used as controls. 15 days after vector injections, tissues were harvested and homogenized in DNAse/RNAse free water using Fastprep tubes (6.5 m/s; 60 seconds).

[0101] Luciferase Activity

[0102] Luciferase assay was used to measure the expression of the reporter gene used as transgene. Tissue lysates were centrifuged at 10000 rpm for 10 min, the supernatant was diluted in lysis buffer in a white opaque 96-well plate. Luciferase activity was measured using EnSpire (PerkinElmer) through sequential injections of assay buffer containing ATP and luciferine.

[0103] Protein quantification was performed on the samples using BCA assay in order to normalize the RLU (relative luminescence unit) on the quantity protein. The final results were expressed as RLU/mg of protein and normalized as fold change versus AAV2 control.

[0104] Results:

[0105] Recombinant AAV vectors were produced by cloning the Cap genes identified in EXAMPLE 1 in a plasmid suitable for vector production. A transgene expression cassette flanked by AAV2 ITRs and expressing a luciferase reporter gene was encapsidated in the so derived AAV vectors. Triple transfection of HEK293 cells was used to produce the vectors followed by immunoaffinity column purification. The capsid sequences that were not efficiently produced as rAAV vectors were excluded. The vectors were tested in wild-type C57Bl6/J mice through intravenous injection of the different vectors at the dose of 1×10¹¹ vg/mice. Fifteen days post-injection, animals were sacrificed and the levels of expression of the transgene were measured in isolated tissues. All new capsids detargeted the liver (FIG. 2) and displayed a marked tropism for the tested tissues: heart, quadriceps and diaphragm. The average fold change of transgene expression in the three tissues tested was used to rank the capsids according to their efficiency. The capsids represented in FIG. 3A-3C are the top scoring in muscle targeting.

### REFERENCES

[0106] Throughout this application, various references describe the state of the art to which this invention pertains. The disclosures of these references are hereby incorporated by reference into the present disclosure.
[0107] 1. Rose J A, Berns K I, Hoggan M D, et al. Evidence for a single-stranded adenovirus-associated virus genome: formation of a DNA density hybrid on release of viral DNA. Proc Natl Acad Sci USA 1969; 64:863-9.
[0108] 2. Atchison R W, Casto B C, Hammon W M. Adenovirus-Associated Defective Virus Particles. Science 1965; 149:754-6.
[0109] 3. Balakrishnan B, Jayandharan G R. Basic biology of adeno-associated virus (AAV) vectors used in gene therapy. Curr Gene Ther 2014; 14:86-100.
[0110] 4. Sonntag F, Schmidt K, Kleinschmidt J A. A viral assembly factor promotes AAV2 capsid formation in the nucleolus. Proc Natl Acad Sci USA 2010; 107:10220-5.
[0111] 5. Yang C C, Xiao X, Zhu X, et al. Cellular recombination pathways and viral terminal repeat hairpin structures are sufficient for adeno-associated virus integration in vivo and in vitro. J Virol 1997; 71:9231-47.
[0112] 6. Nakai H, Wu X, Fuess S, et al. Large-scale molecular characterization of adeno-associated virus vector integration in mouse liver. J Virol 2005; 79:3606-14.
[0113] 7. Huser D, Gogol-Doring A, Chen W, et al. Adeno-associated virus type 2 wild-type and vector-mediated genomic integration profiles of human diploid fibroblasts analyzed by third-generation PacBio DNA sequencing. J Virol 2014; 88:11253-63.
[0114] 8. Schultz B R, Chamberlain J S. Recombinant adeno-associated virus transduction and integration. Mol Ther 2008; 16:1189-99.
[0115] 9. Schnepp B C, Jensen R L, Chen C L, et al. Characterization of adeno-associated virus genomes isolated from human tissues. J Virol 2005; 79:14793-803.
[0116] 10. Boutin S, Monteilhet V, Veron P, et al. Prevalence of serum IgG and neutralizing factors against adeno-associated virus (AAV) types 1, 2, 5, 6, 8, and 9 in the healthy population: implications for gene therapy using AAV vectors. Hum Gene Ther 2010; 21:704-12.
[0117] 11. Calcedo R, Vandenberghe L H, Gao G, et al. Worldwide epidemiology of neutralizing antibodies to adeno-associated viruses. J Infect Dis 2009; 199:381-90.
[0118] 12. Erles K, Sebokova P, Schlehofer J R. Update on the prevalence of serum antibodies (IgG and IgM) to adeno-associated virus (AAV). J Med Virol 1999; 59:406-11.
[0119] 13. Gao G P, Alvira M R, Wang L, et al. Novel adeno-associated viruses from rhesus monkeys as vectors for human gene therapy. Proc Natl Acad Sci USA 2002; 99:11854-9.
[0120] 14. Gao G, Vandenberghe L H, Alvira M R, et al. Clades of Adeno-associated viruses are widely disseminated in human tissues. J Virol 2004; 78:6381-8.
[0121] 15. Mori S, Wang L, Takeuchi T, et al. Two novel adeno-associated viruses from cynomolgus monkey: pseudotyping characterization of capsid protein. Virology 2004; 330:375-83.
[0122] 16. Schmidt M, Voutetakis A, Afione S, et al. Adeno-associated virus type 12 (AAV12): a novel AAV serotype with sialic acid- and heparan sulfate proteoglycan-independent transduction activity. J Virol 2008; 82:1399-406.
[0123] 17. Chandler R J, Sands M S, Venditti C P. Recombinant Adeno-Associated Viral Integration and Genotoxicity: Insights from Animal Models. Hum Gene Ther 2017; 28:314-322.
[0124] 18. Hermonat P L, Muzyczka N. Use of adeno-associated virus as a mammalian DNA cloning vector: transduction of neomycin resistance into mammalian tissue culture cells. Proc Natl Acad Sci USA 1984; 81:6466-70.
[0125] 19. Berns K I, Muzyczka N. AAV: An Overview of Unanswered Questions. Hum Gene Ther 2017; 28:308-313.
[0126] 20. Donsante A, Miller D G, Li Y, et al. AAV vector integration sites in mouse hepatocellular carcinoma. Science 2007; 317:477.
[0127] 21. Chandler R J, LaFave M C, Varshney G K, et al. Vector design influences hepatic genotoxicity after adeno-associated virus gene therapy. J Clin Invest 2015; 125:870-80.
[0128] 22. Wang P R, Xu M, Toffanin S, et al. Induction of hepatocellular carcinoma by in vivo gene targeting. Proc Natl Acad Sci USA 2012; 109:11264-9.
[0129] 23. Hermonat P L, Plott R T, Santin A D, et al. Adeno-associated virus Rep78 inhibits oncogenic transformation of primary human keratinocytes by a human papillomavirus type 16-ras chimeric. Gynecol Oncol 1997; 66:487-94.
[0130] 24. Liu T, Cong M, Wang P, et al. Adeno-associated virus Rep78 protein inhibits Hepatitis B virus replication through regulation of the HBV core promoter. Biochem Biophys Res Commun 2009; 385:106-11.
[0131] 25. Kokorina N A, Santin A D, Li C, et al. Involvement of protein-DNA interaction in adeno-associated virus Rep78-mediated inhibition of HIV-1. J Hum Virol 1998; 1:441-50.
[0132] 26. Nault J C, Datta S, Imbeaud S, et al. Recurrent AAV2-related insertional mutagenesis in human hepatocellular carcinomas. Nat Genet 2015; 47:1187-93.
[0133] 27. Zhao L H, Liu X, Yan H X, et al. Genomic and oncogenic preference of HBV integration in hepatocellular carcinoma. Nat Commun 2016; 7:12992.
[0134] 28. Sung W K, Zheng H, Li S, et al. Genome-wide survey of recurrent HBV integration in hepatocellular carcinoma. Nat Genet 2012; 44:765-9.
[0135] 29. Llovet J M, Zucman-Rossi J, Pikarsky E, et al. Hepatocellular carcinoma. Nat Rev Dis Primers 2016; 2:16018.
[0136] 30. Haberman R P, McCown T J, Samulski R J. Novel transcriptional regulatory signals in the adeno-associated virus terminal repeat A/D junction element. J Virol 2000; 74:8732-9.
[0137] 31. Li H, Durbin R. Fast and accurate long-read alignment with Burrows-Wheeler transform. Bioinformatics 2010; 26:589-95.
[0138] 32. Li H, Handsaker B, Wysoker A, et al. The Sequence Alignment/Map format and SAMtools. Bioinformatics 2009; 25:2078-9.
[0139] 33. Quinlan A R, Hall I M. BEDTools: a flexible suite of utilities for comparing genomic features. Bioinformatics 2010; 26:841-2.
[0140] 34. Bayard Q, Meunier L, Peneau C, et al. Cyclin A2/E1 activation defines a hepatocellular carcinoma subclass with a rearrangement signature of replication stress. Nat Commun 2018; 9:5235.
[0141] 35. Kim D, Pertea G, Trapnell C, et al. TopHat2: accurate alignment of transcriptomes in the presence of insertions, deletions and gene fusions. Genome Biol 2013; 14:R36.
[0142] 36. Trapnell C, Roberts A, Goff L, et al. Differential gene and transcript expression analysis of RNA-seq experiments with TopHat and Cufflinks. Nat Protoc 2012; 7:562-78.
[0143] 37. Sloutskin A, Danino Y M, Orenstein Y, et al. ElemeNT: a computational tool for detecting core promoter elements. Transcription 2015; 6:41-50.
[0144] 38. Nishikawa T, Ota T, Isogai T. Prediction whether a human cDNA sequence contains initiation codon by combining statistical information and similarity with protein sequences. Bioinformatics 2000; 16:960-7.
[0145] 39. Liu H, Han H, Li J, et al. An in-silico method for prediction of polyadenylation signals in human sequences. Genome Inform 2003; 14:84-93.
[0146] 40. Benaglia T, Chauveau D, Hunter D R, et al. mixtools: An R Package for Analyzing Mixture Models. Journal of Statistical Software 2009; 32:1-29.
[0147] 41. Werle-Lapostolle B, Bowden S, Locarnini S, et al. Persistence of cccDNA during the natural history of chronic hepatitis B and decline during adefovir dipivoxil therapy. Gastroenterology 2004; 126:1750-8.
[0148] 42. Mroske C, Rivera H, Ul-Hasan T, et al. A capillary electrophoresis sequencing method for the identification of mutations in the inverted terminal repeats of adeno-associated virus. Hum Gene Ther Methods 2012; 23:128-36.
[0149] 43. Chen C L, Jensen R L, Schnepp B C, et al. Molecular characterization of adeno-associated viruses infecting children. J Virol 2005; 79:14781-92.
[0150] 44. Cancer Genome Atlas Research Network. Electronic address wbe, Cancer Genome Atlas Research N. Comprehensive and Integrative Genomic Characterization of Hepatocellular Carcinoma. Cell 2017; 169:1327-1341 e23.
[0151] 45. Fujimoto A, Furuta M, Totoki Y, et al. Whole-genome mutational landscape and characterization of noncoding and structural mutations in liver cancer. Nat Genet 2016; 48:500-9.
[0152] 46. Schmidt M, Govindasamy L, Afione S, et al. Molecular characterization of the heparin-dependent transduction domain on the capsid of a novel adeno-associated virus isolate, AAV(VR-942). J Virol 2008; 82:8911-6.
[0153] 47. Schnepp B C, Jensen R L, Clark K R, et al. Infectious molecular clones of adeno-associated virus isolated directly from human tissues. J Virol 2009; 83:1456-64.
[0154] 48. Logan G J, Dane A P, Hallwirth C V, et al. Identification of liver-specific enhancer-promoter activity in the 3′ untranslated region of the wild-type AAV2 genome. Nat Genet 2017; 49:1267-1273.
[0155] 49. Park K J, Lee J, Park J H, et al. Adeno-Associated Virus 2-Mediated Hepatocellular Carcinoma is Very Rare in Korean Patients. Ann Lab Med 2016; 36:469-74.
[0156] 50. Nault J C, Couchy G, Balabaud C, et al. Molecular Classification of Hepatocellular Adenoma Associates With Risk Factors, Bleeding, and Malignant Transformation. Gastroenterology 2017; 152:880-894 e6.

1-45. (canceled)

46. A variant VP1 capsid protein that consists of the amino acid sequence as set forth in SEQ ID NO: 2 comprising at least one mutation selected from Table 1; or a derived variant VP2 or variant VP3 capsid protein.

47. A polynucleotide that encodes for a variant capsid protein according to claim 46.

48. An adeno-associated virus (AAV) that comprises at least one capsid protein according to claim 46, in particular a rAAV further comprising a heterologous nucleic acid comprising a transgene.

49. A method of delivering a transgene to a cell comprising contacting the cell with an amount of a rAAV comprising at least one capsid protein according to claim 46 and a heterologous nucleic acid comprising a transgene.

50. A method of therapy in a patient in need thereof, comprising administering to the patient a therapeutically effective amount of a rAAV comprising at least one capsid protein according to claim 46 and a heterologous nucleic acid comprising a transgene.

51. A pharmaceutical composition comprising a rAAV comprising at least one capsid protein according to claim 46 and a heterologous nucleic acid comprising a transgene, with pharmaceutically acceptable excipients, and optionally sustained-release matrices, such as biodegradable polymers.

52. A variant VP1 capsid protein that has an amino acid sequence selected from the group consisting of SEQ ID NO: 26 (capsid #3013), SEQ ID NO: 9 (capsid #2087), SEQ ID NO: 20 (capsid #1449), SEQ ID NO: 10 (capsid #2206), SEQ ID NO: 12 (capsid #1534), SEQ ID NO: 56 (capsid #163), SEQ ID NO: 23 (capsid #1343), SEQ ID NO: 53 (capsid #790), SEQ ID NO: 6 (capsid #1017), SEQ ID NO: 11 (capsid #877), SEQ ID NO: 8 (capsid #1273), SEQ ID NO: 3 (capsid #2497), SEQ ID NO: 60 (capsid #1055), SEQ ID NO: 14 (capsid #1919), SEQ ID NO: 4, SEQ ID NO: 5, SEQ ID NO: 7, SEQ ID NO: 13, SEQ ID NO: 15 to SEQ ID NO: 19, SEQ ID NO: 21, SEQ ID NO: 22, SEQ ID NO: 24, SEQ ID NO: 25, SEQ ID NO: 27 to SEQ ID NO: 55, SEQ ID NO: 57 to SEQ ID NO: 59, or SEQ ID NO: 61; or a derived variant VP2 or variant VP3 capsid protein.

53. A variant VP1 capsid protein that consists of the amino acid sequence as set forth in SEQ ID NO:2 comprising at least one mutation selected from the group consisting of V151A, Q164N; T200S; N201T; M211V; T233Q; M235L; T410Q; S446N; R447K; N449Q; T450S; P451N; T455L; T456Q; Q461L; A467P; S468T; D469S; I470M; R471S; D472L; S474A; R475K; V488L; T491Q; S492A; A493N; E499N; Y500F; S501P; G504A; Q536M; S537H; V539T; S547T; E548N; K549A; T550N; N551D; V552A; I554L; E555D; K556N; S578Y; T581N; R585N; R585S; G586S; R588T; Q589G; A590P; A591T; A593S; A593G; D594T; T597H; V600A; L647M; S658P; T660N; and A663S; or a derived variant VP2 or variant VP3 capsid protein.

The application's sequence listing, which the Patent Office published only in electronic form, follows.

SEQUENCE LISTING (122 sequences)

SEQ ID NO: 1 - DNA, 4679 bp, adeno-associated virus 2
ttggccactccctctctgcgcgctcgctcgctcactgaggccgggcgaccaaaggtcgcccgacgcccgggctttgcccgggcggcctcagtgagcgagcgagcgcgcagagagggagtggccaactccatcactaggggttcctggaggggtggagtcgtgacgtgaattacgtcatagggttagggaggtcctgtattagaggtcacgtgagtgttttgcgacattttgcgacaccatgtggtcacgctgggtatttaagcccgagtgagcacgcagggtctccattttgaagcgggaggtttgaacgcgcagccgccatgccggggttttacgagattgtgattaaggtccccagcgaccttgacgagcatctgcccggcatttctgacagctttgtgaactgggtggccgagaaggaatgggagttgccgccagattctgacatggatctgaatctgattgagcaggcacccctgaccgtggccgagaagctgcagcgcgactttctgacggaatggcgccgtgtgagtaaggccccggaggcccttttctttgtgcaatttgagaagggagagagctacttccacatgcacgtgctcgtggaaaccaccggggtgaaatccatggttttgggacgtttcctgagtcagattcgcgaaaaactgattcagagaatttaccgcgggatcgagccgactttgccaaactggttcgcggtcacaaagaccagaaatggcgccggaggcgggaacaaggtggtggatgagtgctacatccccaattacttgctccccaaaacccagcctgagctccagtgggcgtggactaatatggaacagtatttaagcgcctgtttgaatctcacggagcgtaaacggttggtggcgcagcatctgacgcacgtgtcgcagacgcaggagcagaacaaagagaatcagaatcccaattctgatgcgccggtgatcagatcaaaaacttcagccaggtacatggagctggtcgggtggctcgtggacaaggggattacctcggagaagcagtggatccaggaggaccaggcctcatacatctccttcaatgcggcctccaactcgcggtcccaaatcaaggctgccttggacaatgcgggaaagattatgagcctgactaaaaccgcccccgactacctggtgggccagcagcccgtggaggacatttccagcaatcggatttataaaattttggaactaaacgggtacgatccccaatatgcggcttccgtctttctgggatgggccacgaaaaagttcggcaagaggaacaccatctggctgtttgggcctgcaactaccgggaagaccaacatcgcggaggccatagcccacactgtgcccttctacgggtgcgtaaactggaccaatgagaactttcccttcaacgactgtgtcgacaagatggtgatctggtgggaggaggggaagatgaccgccaaggtcgtggagtcggccaaagccattctcggaggaagcaaggtgcgcgtggaccagaaatgcaagtcctcggcccagatagacccgactcccgtgatcgtcacctccaacaccaacatgtgcgccgtgattgacgggaactcaacgaccttcgaacaccagcagccgttgcaagaccggatgttcaaatttgaactcacccgccgtctggatcatgactttgggaaggtcaccaagcaggaagtcaaagactttttccggtgggcaaaggatcacgtggttgaggtggagcatgaattctacgtcaaaaagggtggagccaagaaaagacccgcccccagtgacgcagatataagtgagcccaaacgggtgcgcgagtcagttgcgcagccatcgacgtcagacgcggaagcttcgatcaactacgcagacaggtaccaaaacaaatgttctcgtcacgtgggcatgaatctgatgctgtttccctgcagacaatgcgagagaatgaatcagaattcaaatatctgcttcactcacggacagaaagactgtttagagtgctttcccgtgtcagaatctcaacccgtttctgtcgtcaaaaaggcgtatcagaaactgtgctacattcatcatatcatgggaaaggtgccagacgcttgcactgcctgcgatctggtcaatgtggatttggatgactgcatctttgaacaataaatgatttaaatcaggtatggctgccgatggttatcttccagattggctcgaggacactctctctgaaggaataagacagtggtggaagctcaaacctggcccaccaccaccaaagcccgcagagcggcataaggacgacagcaggggtcttgtgcttcctgggtacaagtacctcggacccttcaacggactcgacaagggagagccggtcaacgaggcagacgccgcggccctcgagcacgacaaagcctacgaccggcagctcgacagcggagacaacccgtacctcaagtacaaccacgccgacgcggagtttcaggagcgccttaaagaagatacgtcttttgggggcaacctcggacgagcagtcttccaggcgaaaaagagggttcttgaacctctgggcctggttgaggaacctgttaagacggctccgggaaaaaagaggccggtagagcactctcctgtggagccagactcctcctcgggaaccggaaaggcgggccagcagcctgcaagaaaaagattgaattttggtcagactggagacgcagactcagtacctgacccccagcctctcggacagccaccagcagccccctctggtctgggaactaatacgatggctacaggcagtggcgcaccaatggcagacaataacgagggcgccgacggagtgggtaattcctcgggaaattggcattgcgattccacatggatgggcgacagagtcatcaccaccagcacccgaacctgggccctgcccacctacaacaaccacctctacaaacaaatttccagccaatcaggagcctcgaacgacaatcactactttggctacagcaccccttgggggtattttgacttcaacagattccactgccacttttcaccacgtgactggcaaagactcatcaacaacaactggggattccgacccaagagactcaacttcaagctctttaacattcaagtcaaagaggtcacgcagaatgacggtacgacgacgattgccaataaccttaccagcacggttcaggtgtttactgactcggagtaccagctcccgtacgtcctcggctcggcgcatcaaggatgcctcccgccgttcccagcagacgtcttcatggtgccacagtatggatacctcaccctgaacaacgggagtcaggcagtaggacgctcttcattttactgcctggagtactttccttctcagatgctgcgtaccggaaacaactttaccttcagctacacttttgaggacgttcctttccacagcagctacgctcacagccagagtctggaccgtctcatgaatcctctcatcgaccagtacctgtattacttgagcagaacaaacactccaagtggaaccaccacgcagtcaaggcttcagttttctcaggccggagcgagtgacattcgggaccagtctaggaactggcttcctggaccctgttaccgccagcagcgagtatcaaagacatctgcggataacaacaacagtgaatactcgtggactggagctaccaagtaccacctcaatggcagagactctctggtgaatccgggcccggccatggcaagccacaaggacgatgaagaaaagttttttcctcagagcggggttctcatctttgggaagcaaggctcagagaaaacaaatgtggacattgaaaaggtcatgattacagacgaagaggaaatcaggacaaccaatcccgtggctacggagcagtatggttctgtatctaccaacctccagagaggcaacagacaagcagctaccgcagatgtcaacacacaaggcgttcttccaggcatggtctggcaggacagagatgtgtaccttcaggggcccatctgggcaaagattccacacacggacggacattttcacccctctcccctcatgggtggattcggacttaaacaccctcctccacagattctcatcaagaacaccccggtacctgcgaatccttcgaccaccttcagtgcggcaaagtttgcttccttcatcacacagtactccacgggacaggtcagcgtggagatcgagtgggagctgcagaaggaaaacagcaaacgctggaatcccgaaattcagtacacttccaactacaacaagtctgttaatgtggactttactgtggacactaatggcgtgtattcagagcctcgccccattggcaccagatacctgactcgtaatctgtaattgcttgttaatcaataaaccgtttaattcgtttcagttgaactttggtctctgcgtatttctttcttatctagtttccatggctacgtagataagtagcatggcgggttaatcattaactacaaggaacccctagtgatggagttggccactccctctctgcgcgctcgctcgctcactgaggccgggcgaccaaaggtcgcccgacgcccgggctttgcccgggcggcctcagtgagcgagcgagcgcgcagagagggagtggccaa

SEQ ID NO: 2 - protein, 735 aa, adeno-associated virus 2 [sequence omitted]

SEQ ID NO: 3 - protein, 735 aa, adeno-associated virus 2
MAADGYLPDWLEDTLSEGIRQWWKLKPGPPPPKPAERHKDDSRGLVLPGYKYLGPFNGLDKGEPVNEADAAALEHDKAYDRQLDSGDNPYLKYNHADAEFQERLKEDTSFGGNLGRAVFQAKKRVLEPLGLVEEPVKTAPGKKRPVEHSPVEPDSSSGTGKAGQQPARKRLNFGQTGDADSVPDPQPLGQPPAAPSGLGTNTMATGSGAPMADNNEGADGVGNSSGNWHCDSTWMGDRVITTSTRTWALPTYNNHLYKQISSQSGASNDNHYFGYSTPWGYFDFNRFHCHFSPRDWQRLINNNWGFRPKRLNFKLFNIQVKEVTQNDGTTTIANNLTSTVQVFTDSEYQLPYVLGSAHQGCLPPFPADVFMVPQYGYLTLNNGSQAVGRSSFYCLEYFPSQMLRTGNNFQFSYTFEDVPFHSSYAHSQSLDRLMNPLIDQYLYYLSRTNTPSGTTTQSRLQFSQAGASDIRDQSRNWLPGPCYRQQRVSKTAADNSNSEYSWTGATKYHLNGRDSLVNPGPAMASHKDDEEKFFPHSGVLIFGKQGSEKTNVDIEKVMITDEEEIRTTNPVATEQYGTVSTNLQSGNTQAATSDVNTQGILPGMVWQDRDVYLQGPIWAKIPHTDGHFHPSPLMGGFGLKHPPPQILIKNTPVPANPSTTFSAAKFASFITQYSTGQVSVEIEWELQKENSKRWNPEIQYTSNYNKSVNVDFTVDTNGVYSEPRPIGTRYLTRNL

SEQ ID NO: 4 - protein, 735 aa, adeno-associated virus 2
MAADGYLPDWLEDTLSEGIRQWWKLKPGPPPPKPAERHQDDSRGLVLPGYKYLGPFNGLDKGEPVNEADAAALEHDKAYDRQLESGDNPYLKYNHADAEFQERLKEDTSFGGNLGRAVFQAKKRVLEPLGLVEEPVKTAPGKKRPVEHSPVEPDSSSGTGKAGNQPARKRLNFGQTGDADSVPDPQPLGQPPAAPSGLGTNTMATGSGAPMADNNEGADGVGNSSGNWHCDSTWLGDRVITTSTRTWALPTYNNHLYKQISSQSGASNDNHYFGYSTPWGYFDFNRFHCHFSPRDWQRLINNNWGFRPKRLNFKLFNIQVKEVTQNDGTTTIANNLTSTVQVFTDSEYQLPYVLGSAHQGCLPPFPADVFMVPQYGYLTLNNGSQAVGRSSFYCLEYFPSQMLRTGNNFTFSYTFEDVPFHSSYAHSQSLDRLMNPLIDQYLYYLSGTNTPSGTTTQSRLQFSQAGASDIRDQSRNWLPGPCYRQQRVSKTAADNSNSEYSWTGATKYHLNGRDSLVNPGPAMASHKDDEEKFFPQSGVLIFGKQGSEKTNVDIEKVMITDEEEIRTTNPVATEQYGSVSTNLQSGNTQAATSDVNTQGVLPGMVWQDRDVYLQGPIWAKIPHTDGHFHPSPLMGGFGLKHPPPQILIKNTPVPANPSTTFSAAKFASFITQYSTGQVSVEIEWELQKENSKRWNPEIQYTSNYNKSVNVDFTVDTNGVYSEPRPIGTRYLTLNL

SEQ ID NO: 5 - protein, 735 aa, adeno-associated virus 2
MAADGYLPDWLEDTLSEGIRQWWKLKPGPPPPKPAERHKDDSRGLVLPGYKYLGPFNGLDKGEPVNEADAAALEHDKAYDRQLDSGDNPYLKYNHADAEFQERLKEDTSFGGNLGRAVFQAKKRVLEPLGLVEEPVKTAPGKKRPVEHSPVEPDSSSGTGKAGQQPARKRLNFGQTGDADSVPDPQPLGQPPAAPSGLGTNTMATGSGAPMADNNEGADGVGNSSGNWHCDSTWMGDRVITTSTRTWALPTYNNHLYKQISSQSGASNDNHYFGYSTPWGYFDFNRFHCHFSPRDWQRLINNNWGFRPKRLNFKLFNIQVKEVTQNDGTTTIANNLTSTVQVFTDSEYQLPYVLGSAHQGCLPPFPADVFMVPQYGYLTLNNGSQAVGRSSFYCLEYFPSQMLRTGNNFTFSYTFEDVPFHSSYAHSQSLDRLMNPLIDQYLYYLSRTNTPSGTTTQSRLQFSQAGASDIRDQSRNWLPGPCYRQQRVSKTSADNNNSEYSWTGATKYHLNGRDSLVNPGPAMASHKDDEEKFFPQSGVLIFGKQGSEKTNVDIEKVMITDEEEIRTTNPVATEQYGSVSTNLQSGNTQAATADVNTQGVLPGMVWQDRDVYLQGPIWAKIPHTDGHFHPSPLMGGFGLKHPPPQILIKNTPVPANPSTTFSAAKFASFITQYSTGQVSVEIEWELQKENSKRWNPEIQYTSNYNKSVNVDFTVDTNGVYSEPRPIGTRYLTRNL

SEQ ID NO: 6 - protein, 735 aa, adeno-associated virus 2
MAADGYLPDWLEDTLSEGIRQWWKLKPGPPPPKPAERHKDDSRGLVLPGYKYLGPFNGLDKGEPVNEADAAALEHDKAYDRQLDSGDNPYLKYNHADAEFQERLKEDTSFGGNLGRAVFQAKKRVLEPLGLVEEPVKTAPGKKRPVEHSPVEPDSSSGTGKAGQQPARKRLNFGQTGDADSVPDPQPLGQPPAAPSGLGTNTMASGSGAPMADNNEGADGVGNSSGNWHCDSTWMGDRVITTSTRTWALPTYNNHLYKQISSQSGASNDNHYFGYSTPWGYFDFNRFHCHFSPRDWQRLINNNWGFRPKRLNFKLFNIQVKEVTQNDGTTTIANNLTSTVQVFTDSEYQLPYVLGSAHQGCLPPFPADVFMVPQYGYLTLNNGSQAVGRSSFYCLEYFPSQMLRTGNNFTFSYTFEDVPFHSSYAHSQSLDRLMNPLIDQYLYYLSRTNTPSGTTTQSRLQFSQAGASDIRDQSRNWLPGPCYRQQRVSKTSADNNNSEYSWTGATKYHLNGRDSLVNPGPAMASHKDDEEKFFPQSGVLIFGKQDSGKTNVDIEKVMITDEEEIRTTNPVATEQYGAVSTNLQSGNTQAATSDVNAQGVLPGMVWQDRDVYLQGPIWAKIPHTDGHFHPSPLMGGFGLKHPPPQILIKNTPVPANPSTTFSAAKFASFITQYSTGQVSVEIEWELQKENSKRWNPEIQYTSNYNKSVNVDFTVDTNGVYSEPRPIGTRYLTRNL

SEQ ID NO: 7 - protein, 735 aa, adeno-associated virus 2
MAADGYLPDWLEDTLSEGIRQWWKLKPGPPPPKPAERHKDDSRGLVLPGYKYLGPFNGLDKGEPVNEADAAALEHDKAYDRQLDSGDNPYLKYNHADAEFQERLKEDTSFGGNLGRAVFQAKKRVLEPLGLVEEPVKTAPGKKRPVEHSPAEPDSSSGTGKAGQQPARKRLNFGQTGDADSVPDPQPLGQPPAAPSGLGTNTMATGSGAPMADNNEGADGVGNSSGNWHCDSTWMGDRVITTSTRTWALPTYNNHLYKQISSQSGASNDNHYFGYSTPWGYFDFNRFHCHFSPRDWQRLINNNWGFRPKRLNFKLFNIQVKEVTQNDGTTTIANNLTSTVQVFTDSEYQLPYVLGSAHQGCLPPFPADVFMVPQYGYLTLNNGSQAVGRSSFYCLEYFPSQMLRTGNNFTFSYTFEDVPFHSSYAHSQSLDRLMNPLIDQYLYYLSRTNTPSGTTTQSRLQFSQAGASDIRDQSRNWLPGPCYRQQRVSKTAADNNNSEYSWTGATKYHLNGRDSLVNPGPAMASHKDDEEKFFPQSGVLIFGKQDSGKTNVDIEKVMITDEEEIRTTNPVATEQYGAVSTNLQSGNTQAATSDVNAQGVLPGMVWQDRDVYLQGPIWAKIPHTDGHFHPSPLMGGFGLKHPPPQILIKNTPVPANPSTTFSAAKFASFITQYSTGQVSVEIEWELQKENSKRWNPEIQYTSNYNKSVNVDFTVDTNGVYSEPRPIGTRYLTRNL

SEQ ID NO: 8 - protein, 732 aa, adeno-associated virus 2
MAADGYLPDWLEDTLSEGIRQWWKLKPGPPPPKPAERHQDDSRGLVLPGYKYLGPFNGLDKGEPVNEADAAALEHDKAYDRQLDSGDNPYLKYNHADAEFQDRLKEDTSFGGNLGRAVFQAKKRVLEPLGLVEEPVKTAPGKKRPVEHSPVEPDSSSGTGKAGQQPARKRLQTGDADSVPDPQPLGQPPAAPSGLGTNTMATGSGAPMADNNEGADGVGNSSGNWHCDSTWMGDRVITTSTRTWALPTYNNHLYKQISSQSGASNDNHYFGYSTPWGYFDFNRFHCHFSPRDWQRLINNNWGFRPKRLNFKLFNIQVKEVTQNDGTTTIANNLTSTVQVFTDSEYQLPYVLGSAHQGCLPPFPADVFMVPQYGYLTLNNGSQAVGRSSFYCLEYFPSQMLRTGNNFTFSYTFEDVPFHSSYAHSQSLDRLMNPLIDQYLYYLSRTNTPSGTTTQSRLQFSQAGASDIRDQSRNWLPGPCYRQQRVSKTAADNNNSEYSWTGATKYHLNGRDSLVNPGPAMASHKDDEEKFFPQSGVLIFGKQDSGKTNVDIEKVMITDEEEIRTTNPVATEQYGAVSTNLQSGNTQAATSDVNAQGVLPGMVWQDRDVYLQGPIWAKIPHTDGHFHPSPLMGGFGLKHPPPQILIKNTPVPANPSTTFSAAKFASFITQYSTGQVSVEIEWELQKENSKRWNPEIQYTSNYNKSVNVDFTVDTNGVYSEPRPIGTRYLTRNL

SEQ ID NO: 9 - protein, 735 aa, adeno-associated virus 2
MAADGYLPDWLEDTLSEGIRQWWKLKPGPPPPKPAERHKDDSRGLVLPGYKYLGPFNGLDKGEPVNEADAAALEHDKAYDRQLDSGDNPYLKYNHADAEFQERLKEDTSFGGNLGRAVFQAKKRVLEPLGLVEEPVKTAPGKKRPVEHSPVEPDSSSGTGKAGNQPARKRLNFGQTGDADSVPDPQPLGQPPAAPSGLGTNTMASGSGAPMADNNEGADGVGNSSGNWHCDSTWMGDRVITTSTRTWALPTYNNHLYKQISSQSGASNDNHYFGYSTPWGYFDFNRFHCHFSPRDWQRLINNNWGFRPKRLNFKLFNIQVKEVTQNDGTTTIANNLTSTVQVFTDSEYQLPYVLGSAHQGCLPPFPADVFMVPQYGYLTLNNGSQAVGRSSFYCLEYFPSQMLRTGNNFTFSYTFEDVPFHSSYAHSQSLDRLMNPLIDQYLYYLSRTNTPSGTTTQSRLQFSQAGASDIRDQSRNWLPGPCYRQQRVSKTAADNNNSEYSWTGATKYHLNGRDSLVNPGPAMASHKDDEEKFFPQSGVLIFGKQGSEKTNVDIEKVMITDEEEIRTTNPVATEQYGAVSTNLQSGNTQAATSDVNTQGVLPGMVWQDRDVYLQGPIWAKIPHTDGHFHPSPLMGGFGLKHPPPQILIKNTPVPANPSTTFSAAKFASFITQYSTGQVSVEIEWELQKENSKRWNPEIQYTSNYNKSVNVDFTVDTNGVYSEPRPIGTRYLTRNL

SEQ ID NO: 10 - protein, 735 aa, adeno-associated virus 2
MAADGYLPDWLEDTLSEGIRQWWKLKPGPPPPKPAERHKDDSRGLVLPGYKYLGPFNGLDKGEPVNEADAAALEHDKAYDRQLDSGDNPYLKYNHADAEFQERLKEDTSFGGNLGRAVFQAKKRVLEPLGLVEEPVKTAPGKKRPVEHSPAEPDSSSGTGKAGNQPARKRLNFGQTGDADSVPDPQPLGQPPAAPSGLGTNTMASGSGAPMADNNEGADGVGNSSGNWHCDSTWMGDRVITTSTRTWALPTYNNHLYKQISSQSGASNDNHYFGYSTPWGYFDFNRFHCHFSPRDWQRLINNNWGFRPKRLNFKLFNIQVKEVTQNDGTTTIANNLTSTVQVFTDSEYQLPYVLGSAHQGCLPPFPADVFMVPQYGYLTLNNGSQAVGRSSFYCLEYFPSQMLRTGNNFTFSYTFEDVPFHSSYAHSQSLDRLMNPLIDQYLYYLSRTNTPSGTTTQSRLQFSQAGASDIRDQSRNWLPGPCYRQQRVSKTSADNNNSEYSWTGATKYHLNGRDSLVNPGPAMASHKDDEEKFFPQSGVLIFGKQGSEKTNVDIEKVMITDEEEIRTTNPVATEQYGAVSTNLQSGNTQAATSDVNTQGVLPGMVWQDRDVYLQGPIWAKIPHTDGHFHPSPLMGGFGLKHPPPQILIKNTPVPANPSTTFSAAKFASFITQYSTGQVSVEIEWELQKENSKRWNPEIQYTSNYNKSVNVDFTVDTNGVYSEPRPIGTRYLTRNL

SEQ ID NO: 11 - protein, 735 aa, adeno-associated virus 2
MAADGYLPDWLEDTLSEGIRQWWKLKPGPPPPKPAERHKDDSRGLVLPGYKYLGPFNGLDKGEPVNEADAAALEHDKAYDRQLDSGDNPYLKYNHADAEFQERLKEDTSFGGNLGRAVFQAKKRVLEPLGLVEEPVKTAPGKKRPVEHSPAEPDSSSGTGKAGNQPARKRLNFGQTGDADSVPDPQPLGQPPAAPSGLGTNTMATGSGAPMADNNEGADGVGNSSGNWHCDSTWMGDRVITTSTRTWALPTYNNHLYKQISSQSGASNDNHYFGYSTPWGYFDFNRFHCHFSPRDWQRLINNNWGFRPKRLNFKLFNIQVKEVTQNDGTTTIANNLTSTVQVFTDSEYQLPYVLGSAHQGCLPPFPADVFMVPQYGYLTLNNGSQAVGRSSFYCLEYFPSQMLRTGNNFTFSYTFEDVPFHSSYAHSQSLDRLMNPLIDQYLYYLSRTNTPSGTTTQSRLQFSQAGASDIRDQSRNWLPGPCYRQQRVSKTAADNNNSEYSWTGATKYHLNGRDSLVNPGPAMASHKDDEEKFFPQSGVLIFGKQGSEKTNVDIEKVMITDEEEIRTTNPVATEQYGSVSTNLQSGNTQAATADVNTQGVLPGMVWQDRDVYLQGPIWAKIPHTDGHFHPSPLMGGFGLKHPPPQILIKNTPVPANPSTTFSAAKFASFITQYSTGQVSVEIEWELQKENSKRWNPEIQYTSNYNKSVNVDFTVDTNGVYSEPRPIGTRYLTRNL

SEQ ID NO: 12 - protein, 735 aa, adeno-associated virus 2
MAADGYLPDWLEDTLSEGIRQWWKLKPGPPPPKPAERHQDDSRGLVLPGYKYLGPFNGLDKGEPVNEADAAALEHDKAYDRQLDSGDNPYLKYNHADAEFQERLKEDTSFGGNLGRAVFQAKKRVLEPLGLVEEPVKTAPGKKRPVEHSPAEPDSSSGTGKAGNQPARKRLNFGQTGDADSVPDPQPLGQPPAAPSGLGTNTMATGSGAPMADNNEGADGVGNSSGNWHCDSTWMGDRVITTSTRTWALPTYNNHLYKQISSQSGASNDNHYFGYSTPWGYFDFNRFHCHFSPRDWQRLINNNWGFRPKRLNFKLFNIQVKEVTQNDGTTTIANNLTSTVQVFTDSEYQLPYVLGSAHQGCLPPFPADVFMVPQYGYLTLNNGSQAVGRSSFYCLEYFPSQMLRTGNNFTFSYTFEDVPFHSSYAHSQSLDRLMNPLIDQYLYYLSRTNTPSGTTTQSRLQFSQAGASDIRDQSRNWLPGPCYRQQRVSKTAADNNNSEYSWTGATKYHLNGRDSLVNPGPAMASHKDDEEKFFPQSGVLIFGKQGSEKTNVDIEKVMITDEEEIRTTNPVATEQYGSVSTNLQSGNTQAATSDVNTQGVLPGMVWQDRDVYLQGPIWAKIPHTDGHFHPSPLMGGFGLKHPPPQILIKNTPVPANPSTTFSAAKFASFITQYSTGQVSVEIEWELQKENSKRWNPEIQYTSNYNKSVNVDFTVDTNGVYSEPRPIGTRYLTRNL

SEQ ID NO: 13 - protein, 735 aa, adeno-associated virus 2
MAADGYLPDWLEDTLSEGIRQWWKLKPGPPPPKPAERHKDDSRGLVLPGYKYLGPFNGLDKGEPVNEADAAALEHDKAYDRQLDSGDNPYLKYNHADAEFQERLKEDTSFGGNLGRAVFQAKKRVLEPLGLVEEPVKTAPGKKRPVEHSPAEPDSSSGTGKAGNQPARKRLNFGQTGDADSVPDPQPLGQPPAAPSGLGTNTMATGSGAPMADNNEGADGVGNSSGNWHCDSTWMGDRVITTSTRTWALPTYNNHLYKQISSQSGASNDNHYFGYSTPWGYFDFNRFHCHFSPRDWQRLINNNWGFRPKRLNFKLFNIQVKEVTQNDGTTTIANNLTSTVQVFTDSEYQLPYVLGSAHQGCLPPFPADVFMVPQYGYLTLNNGSQAVGRSSFYCLEYFPSQMLRTGNNFTFSYTFEDVPFHSSYAHSQSLDRLMNPLIDQYLYYLSRTNTPSGTTTQSRLQFSQAGASDIRDQSRNWLPGPCYRQQRVSKTAADNNNSEYSWTGATKYHLNGRDSLVNPGPAMASHKDDEEKFFPQSGVLIFGKQGSEKTNVDIEKVMITDEEEIRTTNPVATEQYGSVSTNLQSGNTQAATADVNTQGVLPGMVWQDRDVYLQGPIWAKIPHTDGHFHPSPLMGGFGLKHPPPQILIKNTPVPANPSTTFSAAKFASFITQYSTGQVSVEIEWELQKENSKRWNPEIQYTSNYNKSVNADLTVDTNGVYSEPRPIGTRYLTRNL

SEQ ID NO: 14 - protein, 735 aa, adeno-associated virus 2
MAADGYLPDWLEDTLSEGIRQWWKLKPGPPPPKPAERHKDDSRGLVLPGYKYLGPFNGLDKGEPVNEADAAALEHDKAYDRQLDSGDNPYLKYNHADAEFQERLKEDTSFGGNLGRAVFQAKKRVLEPLGLVEEPVKTAPGKKRPVEHSPVEPDSSSGTGKAGNQPARKRLNFGQTGDADSVPDPQPLGQPPAAPSGLGTNTMATGSGAPMADNNEGADGVGNSSGNWHCDSTWMGDRVITTSTRTWALPTYNNHLYKQISSQSGASNDNHYFGYSTPWGYFDFNRFHCHFSPRDWQRLINNNWGFRPKRLNFKLFNIQVKEVTQNDGTTTIANNLTSTVQVFTDSEYQLPYVLGSAHQGCLPPFPADVFMVPQYGYLTLNNGSQAVGRSSFYCLEYFPSQMLRTGNNFTFSYTFEDVPFHSSYAHSQSLDRLMNPLIDQYLYYLSRTNTPSGTTTQSRLQFSQAGASDIRDQSRNWLPGPCYRQQRVSKTAADNNNSEYSWTGATKYHLNGRDSLVNPGPAMASHKDDEEKFFPQSGVLIFGKQGSEKTNVDIEKVMITDEEEIRTTNPVATEQYGAVSTNLQSGNTQAATSDVNTQGVLPGMVWQDRDVYLQGPIWAKIPHTDGHFHPSPLMGGFGLKHPPPQILIKNTPVPANPSTTFSAAKFASFITQYSTGQVSVEIEWELQKENSKRWNPEIQYTSNYNKSVNVDFTVDTNGVYSEPRPIGTRYLTRNL

SEQ ID NO: 15 - protein, 735 aa, adeno-associated virus 2
MAADGYLPDWLEDTLSEGIRQWWKLKPGPPPPKPAERHKDDGRGLVLPGYKYLGPFNGLDKGEPVNEADAAALEHDKAYDRQLDSGDNPYLKYNHADAEFQERLKEDTSFGGNLGRAVFQAKKRVLEPLGLVEEPVKTAPGKKRPVEHSPAEPDSSSGTGKAGQQPARKRLNFGQTGDADSVPDPQPLGQPPAAPSGLGTNTMATGSGAPMADNNEGADGVGNSSGNWHCDSTWMGDRVITTSTRTWALPTYNNHLYKQISSQSGASNDNHYFGYSTPWGYFDFNRFHCHFSPRDWQRLINNNWGFRPKRLNFKLFNIQVKEVTQNDGTTTIANNLTSTVQVFTDSEYQLPYVLGSAHQGCLPPFPADVFMVPQYGYLTLNNGSQAVGRSSFYCLEYFPSQMLRTGNNFTFSYTFEDVPFHSSYAHSQSLDRLMNPLIDQYLYYLSRTNTPSGTTTQSRLQFSQAGASDIRDQSRNWLPGPCYRQQRVSKTSADNNNSEYSWTGATKYHLNGRDSLVNPGPAMASHKDDEEKFFPQSGVLIFGKQGSEKTNVDIEKVMITDEEEIRTTNPVATEQYGAVSTNLQSGNTQAATSDVNAQGVLPGMVWQDRDVYLQGPIWAKIPHTDGHFHPSPLMGGFGLKHPPPQILIKNTPVPANPSTTFSAAKFASFITQYSTGQVSVEIEWELQKENSKRWNPEIQYTSNYNKSVNVDFTVDTNGVYSEPRPIGTRYLTRNL

SEQ ID NO: 16 - protein, 735 aa, adeno-associated virus 2
MAADGYLPDWLEDTLSEGIRQWWKLKPGPPPPKPAERHKDDSRGLVLPGYKYLGPFNGLDKGEPVNEADAAALEHDKAYDRQLDSGDNPYLKYNHADAEFQERLKEDTSFGGNLGRAVFQAKKRVLEPLGLVEEPVKTAPGKKRPVEHSPAEPDSSSGTGKAGNQPARKRLNFGQTGDADSVPDPQPLGQPPAAPSGLGTNTMATGSGAPMADNNEGADGVGNSSGNWHCDSTWMGDRVITTSTRTWALPTYNNHLYKQISSQSGASNDNHYFGYSTPWGYFDFNRFHCHFSPRDWQRLINNNWGFRPKRLNFKLFNIQVKEVTQNDGTTTIANNLTSTVQVFTDSEYQLPYVLGSAHQGCLPPFPADVFMVPQYGYLTLNNGSQAVGRSSFYCLEYFPSQMLRTGNNFTFSYTFEDVPFHSSYAHSQSLDRLMNPLIDQYLYYLSRTNTPSGTTTQSRLQFSQAGASDIRDQSRNWLPGPCYRQQRVSKTPADNNNSEYSWTGATKYHLNGRDSLVNPGPAMASHKDDEEKFFPQSGVLIFGKQGSEKTNVDIEKVMITDEEEIRTTNPVATEQYGSVSTNLQSGNTQAATADVNTQGVLPGMVWQDRDVYLQGPIWAKIPHTDGHFHPSPLMGGFGLKHPPPQILIKNTPVPANPSTTFSAAKFASFITQYSTGQVSVEIEWELQKENSKRWNPEIQYTSNYNKSVNVDFTVDTNGVYSEPRPIGTRYLTRNL

SEQ ID NO: 17 - protein, 735 aa, adeno-associated virus 2; identical to SEQ ID NO: 16

SEQ ID NO: 18 - protein, 735 aa, adeno-associated virus 2
MAADGYLPDWLEDTLSEGIRQWWKLKPGPPPPKPAERHKDDSRGLVLPGYKYLGPFNGLDKGEPVNEADAAALEHDKAYDRQLDSGDNPYLKYNHADAEFQERLKEDTSFGGNLGRAVFQAKKRVLEPLGLVEEPVKTAPGKKRPVEHSPAEPDSSSGTGKSGNQPARKRLNFGQTGDADSVPDPQPLGQPPAAPSGLGTNTMATGSGAPMADNNEGADGVGNSSGNWHCDSTWMGDRVITTSTRTWALPTYNNHLYKQISSQSGASNDNHYFGYSTPWGYFDFNRFHCHFSPRDWQRLINNNWGFRPKRLNFKLFNIQVKEVTQNDGTTTIANNLTSTVQVFTDSEYQLPYVLGSAHQGCLPPFPADVFMVPQYGYLTLNNGSQAVGRSSFYCLEYFPSQMLRTGNNFTFSYTFEDVPFHSSYAHSQSLDRLMNPLIDQYLYYLSRTNTPSGTTTQSRLQFSQAGASDIRDQSRNWLPGPCYRQQRVSKTPADNNNSEYSWTGATKYHLNGRDSLVNPGPAMASHKDDEEKFFPQSGVLIFGKQGSEKTNVDIEKVMITDEEEIRTTNPVATEQYGSVSTNLQSGNTQAATADVNTQGVLPGMVWQDRDVYLQGPIWAKIPHTDGHFHPSPLMGGFGLKHPPPQILIKNTPVPANPSTTFSAAKFASFITQYSTGQVSVEIEWELQKENSKRWNPEIQYTSNYNKSVNVDFTVDTNGVYSEPRPIGTRYLTRNL

SEQ ID NO: 19 - protein, 735 aa, adeno-associated virus 2
MAADGYLPDWLEDTLSEGIRQWWKLKPGPPPPKPAERHKDDSRGLVLPGYKYLGPFNGLDKGEPVNEADAAALEHDKAYDRQLDSGDNPYLKYNHADAEFQERLKEDTSFGGNLGRAVFQAKKRVLEPLGLVEEPVKTAPGKKRPVEHSPVEPDSSSGTGKAGQQPARKRLNFGQTGDADSVPDPQPLGQPPAAPSGLGTTTMATGSGAPMADNNEGADGVGNSSGNWHCDSTWMGDRVITTSTRTWALPTYNNHLYKQISSQSGASNDNHYFGYSTPWGYFDFNRFHCHFSPRDWQRLINNNWGFRPKRLNFKLFNIQVKEVTQNDGTTTIANNLTSTVQVFTDSEYQLPYVLGSAHQGCLPPFPADVFMVPQYGYLTLNNGSQAVGRSSFYCLEYFPSQMLRTGNNFTFSYTFEDVPFHSSYAHSQSLDRLMNPLIDQYLYYLSRTNTPSGTTTQSRLQFSQAGASDIRDQSRNWLPGPCYRQQRVSKTAADNNNSEYSWTGATKYHLNGRDSLVNPGPAMASHKDDEEKFFPQSGVLIFGKQGSEKTNVDIEKVMITDEEEIRTTNPVATEQYGSVSTNLQSGNTQAATADVNTQGVLPGMVWQDRDVYLQGPIWAKIPHTDGHFHPSPLMGGFGLKHPPPQILIKNTPVPANPSTTFSAAKFASFITQYSTGQVSVEIEWELQKENSKRWNPEIQYTSNYNKSVNVDFTVDTNGVYSEPRPIGTRYLTRNL

SEQ ID NO: 20 - protein, 735 aa, adeno-associated virus 2
MAADGYLPDWLEDTLSEGIRQWWKLKPGPPPPKPAERHKDDNRGLVLPGYKYLGPFNGLDKGEPVNEADAAALEHDKAYDRQLDSGDNPYLKYNHADAEFQERLKEDTSFGGNLGRAVFQAKKRVLEPLGLVEEPVKTAPGKKRPVEHSPVEPDSSSGTGKSGQQPARKRLNFGQTGDADSVPDPQPLGQPPAAPSGLGTNTMATGSGAPMADNNEGADGVGNSSGNWHCDSTWMGDRVITTSTRTWALPTYNNHLYKQISSQSGASNDNHYFGYSTPWGYFDFNRFHCHFSPRDWQRLINNNWGFRPKRLNFKLFNIQVKEVTQNDGTTTIANNLTSTVQVFTDSEYQLPYVLGSAHQGCLPPFPADVFMVPQYGYLTLNNGSQAVGRSSFYCLEYFPSQMLRTGNNFTFSYTFEDVPFHSSYAHSQSLDRLMNPLIDQYLYYLSRTNTPSGTTTQSRLQFSQAGASDIRDQSRNWLPGPCYRQQRVSKTPADNNNSEYSWTGATKYHLNGRDSLVNPGPAMASHKDDEEKFFPQSGVLIFGKQGSEKTNVDIEKVMITDEEEIRTTNPVATEQYGTVSTNLQSGNTQAATSDVNTQGILPGMVWQDRDVYLQGPIWAKIPHTDGHFHPSPLMGGFGLKHPPPQILIKNTPVPANPSTTFSAAKFASFITQYSTGQVSVEIEWELQKENSKRWNPEIQYTSNYNKSVNVDFTVDTNGVYSEPRPIGTRYLTRNL

SEQ ID NO: 21 - protein, 733 aa, adeno-associated virus 2
MAADGYLPDWLEDTLSEGIRQWWKLKPGPPPPKPAERHKDDSRGLVLPGYKYLGPFNGLDKGEPVNEADAAALEHDKAYDRQLDSGDNPYLKYNHADAEFQERLKEDTSFGGNLGRAVFQAKKRVLEPLGLVEEPVKTAPGKKRPVEHSPAEPDSSSGTGKAGNQPARKRLNFGQTGDADSVPDPQPLGQPPAAPSGLGTNTMATGSGAPMADNNEGADGVGNSSGNWHCDSTWMGDRVITTSTRTWALPTYNNHLYKQISSQSGASNDNHYFGYSTPWGYFDFNRFHCHFSPRDWQRLINNNWGFRPKRLNFKLFNIQVKEVTQNDGTTTIANNLTSTVQVFTDSEYQLPYVLGSAHQGCLPPFPADVFMVPQYGYLTLNNGSQAVGRSSFYCLEYFPSQMLRTGNNFTFSYTFEDVPFHSSYAHSQSLDRLMNPLIDQYLYYLSRTNTPSGTTTQSRLQFSQAGASDIRDQSRNWLPGPCYRQQRVSKTSADNNNSEYSWTGATKYHLNGRDSLVNPGPAMASHKDDEEKFFPQSGVLIFGKQGSEKTNVEKVMITDEEEIRTTNPVATEQYGAVSTNLQSGNTQAATADVNTQGVLPGMVWQDRDVYLQGPIWAKIPHTDGHFHPSPLMGGFGLKHPPPQILIKNTPVPANPSTTFSAAKFASFITQYSTGQVSVEIEWELQKENSKRWNPEIQYTSNYNKSVNVDFTVDTNGVYSEPRPIGTRYLTRNL

SEQ ID NO: 22 - protein, 735 aa, adeno-associated virus 2
MAADGYLPDWLEDTLSEGIRQWWKLKPGPPPPKPAERHKDDSRGLVLPGYKYLGPFNGLDKGEPVNEADAAALEHDKAYDRQLDSGDNPYLKYNHADAEFQERLKEDTSFGGNLGRAVFQAKKRVLEPLGLVEEPVKTAPGKKRPVEHSPVEPDSSSGTGKAGNQPARKRLNFGQTGDADSVPDPQPLGQPPAAPSGLGTNTMATGSGAPMADNNEGADGVGNSSGNWHCDSTWMGDRVITTSTRTWALPTYNNHLYKQISSQSGASNDNHYFGYSTPWGYFDFNRFHCHFSPRDWQRLINNNWGFRPKRLNFKLFNIQVKEVTQNDGTTTIANNLTSTVQVFTDSEYQLPYVLGSAHQGCLPPFPADVFMVPQYGYLTLNNGSQAVGRSSFYCLEYFPSQMLRTGNNFTFSYTFEDVPFTSRYAHSQSLDRLMNPLIDQYLYYLSRTNTPSGTTTQSRLQFSQAGASDIRDQSRNWLPGPCYRQQRVSKTSADNNNSEYSWTGATKYHLNGRDSLVNPGPAMASHKDDEEKFFPQSGVLIFGKQGSEKTNVDIEKVMITDGEEIRTTNPVATEQYGSVSTNLQRGNTQAATADVNTQGVLPGMVWQDRDVYLQGPIWAKIPHTDGHFHPSPLMGGFGLKHPPPQILIKNTPVPANPSTTFSAAKFASFITQYSTGQVSVEIEWELQKENSKRWNPEIQYTSNYNKSVNVDFTVDTNGVYSEPRPIGTRYLTRNL

SEQ ID NO: 23 - protein, 735 aa, adeno-associated virus 2
MAADGYLPDWLEDTLSEGIRQWWKLKPGPPPPKPAERHKDDSRGLVLPGYKYLGPFNGLDKGEPVNEADAAALEHDKAYDRQLDSGDNPYLKYNHADAEFQERLKEDTSFGGNLGRAVFQAKKRVLEPLGLVEEPVKTAPGKKRPVEHSPVEPDSSSGTGKAGQQPARKRLNFGQTGDADSVPDPQPLGQPPAAPSGLGTNTMATGSGAPMADNNEGADGVGNSSGNWHCDSTWMGDRVITTSTRTWALPTYNNHLYKQISSQSGASNDNHYFGYSTPWGYFDFNRFHCHFSPRDWQRLINNNWGFRPKRLNFKLFNIQVKEVTQNDGTTTIANNLTSTVQVFTDSEYQLPYVLGSAHQGCLPPFPADVFMVPQYGYLTLNNGSQAVGRSSFYCLEYFPSQMLRTGNNFTFSYTFEDVPFHSSYAHSQSLDRLMNPLIDQYLYYLSKTNAPSGTTTMSRLQFSQAGASDIRDQSRNWLPGPCYRQQRVSKTAADNNNSDYSWTGATKYHLNGRDSLVNPGTAMASHKDDEEKYFPQSGVLIFGKQDSGKTNVDIEKVMITDEEEIRTTNPVATEQYGSVSTNLQSGNTQAATSDVNTQGVLPGMVWQDRDVYLQGPIWAKIPHTDGHFHPSPLMGGFGLKHPPPQILIKNTPVPANPSTTFSAAKFASFITQYSTGQVSVEIEWELQKENSKRWNPEIQYTSNYNKSVNVDFTVDTNGVYSEPRPIGTRYLTRNL

SEQ ID NO: 24 - protein, 735 aa, adeno-associated virus 2
MAADGYLPDWLEDTLSEGIRQWWKLKPGPPPPKPAERHKDDSRGLVLPGYKYLGPFNGLDKGEPVNEADAAALEHDKAYDRQLDSGDNPYLKYNHADAEFQERLKEDTSFGGNLGRAVFQAKKRVLEPLGLVEEPVKTAPGKKRPVEHSPVEPDSSSGTGKAGQQPARKRLNFGQTGDADSVPDPQPLGQPPAAPSGLGTNTMATGSGAPMADNNEGADGVGNSSGNWHCDSTWMGDRVITTSTRTWALPTYNNHLYKQISSQSGASNDNHYFGYSTPWGYFDFNRFHCHFSPRDWQRLINNNWGFRPKRLNFKLFNIQVKEVTQNDGTTTIANNLTSTVQVFTDSEYQLPYVLGSAHQGCLPPFPADVFMVPQYGYLTLNNGSQAVGRSSFYCLEYFPSQMLRTGNNFTFSYTFEDVPFHSSYAHSQSLDRLMNPLIDQYLYYLSKTNAPSGTTTMSRLQFSQAGASDIRDQSRNWLPGPCYRQQRVSKTAADNNNSDYSWTGATKYHLNGRDSLVNPGTAMASHKDDEEKYFPQSGVLIFGKQDSGKTNVDIEKVMITDEEEIRTTNPVATEQYGSVSTNLQSGNTQAATSDVNTQGVLSGMVWQDRDVYLQGPIWAKIPHTDGHFHPSPLMGGFGLKHPPPQILIKNTPVPANPSTTFSAAKFASFITQYSTGQVSVEIEWELQKENSKRWNPEIQYTSNYNKSVNVDFTVDTNGVYSEPRPIGTRYLTRNL

SEQ ID NO: 25 - protein, 735 aa, adeno-associated virus 2
MAADGYLPDWLEDTLSEGIRQWWKLKPGPPPPKPAERHKDDSRGLVLPGYKYLGPFNGLDKGEPVNEADAAALEHDKAYDRQLDSGDNPYLKYNHADAEFQERLKEDTSFGGNLGRAVFQAKKRVLEPLGLVEEPVKTAPGKKRPVEHSPAEPDSSSGTGKSGQQPARKRLNFGQTGDADSVPDPQPLGQPPAAPSGLGTNTMATGSGAPMADNNEGADGVGNSSGNWHCDSTWMGDRVITTSTRTWALPTYNNHLYKQISSQSGASNDNHYFGYSTPWGYFDFNRFHCHFSPRDWQRLINNNWGFRPKRLSFKLFNIQVKEVTQNDGTTTIANNLTSTVQVFTDSEYQLPYVLGSAHQGCLPPFPADVFMVPQYGYLTLNNGSQAVGRSSFYCLEYFPSQMLRTGNNFTFSYTFEDVPFHSSYAHSQSLDRLMNPLIDQYLYYLSRTNTPSGTTTMSRLQFSQAGASDIRDQSRNWLPGPCYRQQRVSKTAADNNNSDYSWTGATKYHLNGRDSLVNPGPAMASHKDDEEKYFPQSGVLIFGKQDSGKTNVDIEKVMITDEEEIRTTNPVATEQYGSVSTNLQSGNTQAATSDVNTQGVLPGMVWQDRDVYLQGPIWAKIPHTDGHFHPSPLMGGFGLKHPPPQILIKNTPVPANPSTTFSAAKFASFITQYSTGQVSVEIEWELQKENSKRWNPEIQYTSNYNKSVNVDFTVDTNGVYSEPRPIGTRYLTRNL

SEQ ID NO: 26 - protein, 735 aa, adeno-associated virus 2
MAADGYLPDWLEDTLSEGIRQWWKLKPGPPPPKPAERHKDDSRGLVLPGYKYLGPFNGLDKGEPVNEADAAALEHDKAYDRQLDSGDNPYLKYNHADAEFQERLKEDTSFGGNLGRAVFQAKKRVLEPLGLVEEPVKTAPGKKRPVEHSPAEPDSSSGTGKAGQQPARKRLNFGQTGDADSVPDPQPLGQPPAAPSGLGTNTMATGSGAPMADNNEGADGVGNSSGNWHCDSTWMGDRVITTSTRTWALPTYNNHLYKQISSQSGASNDNHYFGYSTPWGYFDFNRFHCHFSPRDWQRLINNNWGFRPKRLNFKLFNIQVKEVTQNDGTTTIANNLTSTVQVFTDSEYQLPYVLGSAHQGCLPPFPADVFMVPQYGYLTLNNGSQAVGRSSFYCLEYFPSQMLRTGNNFTFSYTFEDVPFHSSYAHSQSLDRLMNPLIDQYLYYLSRTNTPSGTTTMSRLQFSQAGASDIRDQSRNWLPGPCYRQQRVSKTAADNNNSDYSWTGATKYHLNGRDSLVNPGPAMASHKDDEEKYFPQSGVLIFGKQDSGKTNVDIEKVMITDEEEIRTTNPVATEQYGSVSTNLQSGNTQAATSDVNTQGVLPGMVWQDRDVYLQGPIWAKIPHTDGHFHPSPLMGGFGLKHPPPQILIKNTPVPANPSTTFSAAKFASFITQYSTGQVSVEIEWELQKENSKRWNPEIQYTSNYNKSVNVDFTVDTNGVYSEPRPIGTRYLTRNL

SEQ ID NO: 27 - protein, 735 aa, adeno-associated virus 2
MAADGYLPDWLEDTLSEGIRQWWKLKPGPPPPKPAERHKDDSRGLVLPGYKYLGPFNGLDKGEPVNEADAAALEHDKAYDRQLDSGDNPYLKYNHADAEFQERLKEDTSFGGNLGRAVFQAKKRVLEPLGLVEEPVKTAPGKKRPVEHSPAEPDSSSGTGKSGQQPARKRLNFGQTGDADSVPDPQPLGEPPAAPTSLGSTTMASGGGAPVADNNEGADGVGNSSGNWHCDSQWLGDRVITTSTRTWALPTYNNHLYKQISSQSGASNDNHYFGYSTPWGYFDFNRFHCHFSPRDWQRLINNNWGFRPKRLNFKLFNIQVKEVTQNDGTTTIANNLTSTVQVFTDSEYQLPYVLGSAHQGCPPPFPADVFMVPQYGYLTLNNGSQAVGRSSFYCLEYFPSQMLRTGNNFTFSYTFEDVPFHSSYAHSQSLDRLMNPLIDQYLYYLSRTNTPSGTTTQSRLQFSQAGASDIRDQSRNWLPGPCYRQQRVSKTAADNNNSEYSWTGATKYHLNGRDSLVNPGPAMASHKDDEEKFFPQSGVLIFGKQGSEKTNVDIEKVMITDEEEIRTTNPVATEQYGSVSTNLQSGNTQAATSDVNTQGVLPGMVWQDRDVYLQGPIWAKIPHTDGHFHPSPLMGGFGLKHPPPQIMIKNTPVPANPPTNFSSAKFASFITQYSTGQVSVEIEWELQKENSKRWNPEIQYTSNYNKSVNVDFTVDTNGVYSEPRPIGTRYLTRNL

SEQ ID NO: 28 - protein, 735 aa, adeno-associated virus 2
  misc_feature (451)..(451): Xaa can be any naturally occurring amino acid
MAADGYLPDWLEDTLSEGIRQWWKLKPGPPPPKPAERHQDDSRGLVLPGYKYLGPFNGLDKGEPVNEADAAALEHDKAYDRQLDSGDNPYLKYNHADAEFQERLKEDTSFGGNLGRAVFQAKKRVLEPLGLVEEPVKTAPGKKRPVEHSPAEPDSSSGTGKAGQQPARKRLNFGQTGDADSVPDPQPLGQPPAAPTSLGSTTMATGSGAPMADNNEGADGVGNSSGNWHCDSQWLGDRVITTSTRTWALPTYNNHLYKQISSQSGASNDNHYFGYSTPWGYFDFNRFHCHFSPRDWQRLINNNWGFRPKRLNFKLFNIQVKEVTQNDGTTTIANNLTSTVQVFTDSEYQLPYVLGSAHQGCLPPFPADVFMVPQYGYLTLNNGSQAVGRSSFYCLEYFPSQMLRTGNNFTFSYTFEDVPFHSSYAHSQSLDRLMNPLIDQYLYYLNRTQTXSGTPTQSRLLFSQAGPTSMSLQAKNWLPGPCYRQQRLSKQANDNNNSNFPWTGATKYHLNGRDSLVNPGPAMASHKDDEEKFFPMHGTLIFGKQGSEKTNAELENVMITDEEEIRTTNPVATEQYGSVSTNLQRGNRQAATADVNTQGVLPGMVWQDRDVYLQGPIWAKIPHTDGHFHPSPLMGGFGLKHPPPQILIKNTPVPANPSTTFSAAKFASFITQYSTGQVSVEIEWELQKENSKRWNPEIQYTSNYNKSVNVDFTVDTNGVYSEARPIGTRYLTRNL

SEQ ID NO: 29 - protein, 734 aa, adeno-associated virus 2
MAADGYLPDWLEDTLSEGIRQWWKLKPGPPPPKPAERHKDDSRGLVLPGYKYLGPFNGLDKGEPVNEADAAALEHDKAYDRQLDSGDNPYLKYNHADAEFQERLKEDTSFGGNLGRAVFQAKKRVLEPLGLVEERVKTAPGKKRPVAVAHQWQTITRVPMEWVIPQEKRLNFGQTGDADWHCDPQPLGQPPAAPSGLGSTTMATGSGALLLLESLSADGVGNSSGNWHCDSQWLGDRVITTSTRTWALPTYNNHLYKQISSQSGASNDNHYFGYSTPWGYFDFNRFHCHFSPRDWQRLINNNWGFRPKRLNFKLFNIQVKEVTQNDGTTTIANNLTSTVQVFTDSEYQLPYVLGSAHQGCLPPFPADVFMVPQYGYLTLNNGSQAVGRSSFYCLEYFPSQMLRTGNNFQFSYTFEDVPFHSSYAHSQSLDRLMNPLIDQYLYYLNKTQSNSGTTTMSRLLFSQAGPTSMSLHAKNWLPGPCYRQQRLSKQANDNNNSNFPWTAATKYHLNGSDSLINPGPAMASHKDDEEKFFPQSGVLIFGKQGSEKTNVDIEKVMITDEEEIRTTNPVATEQYGSVSTNLQRGNRRAATADVNTQGVLPGMVWQDRDVYLQGPIWAKIPHTDGHFHPSPLMGGFGLKHPPPQILIKNTPVPANPSTTFSAAKFASFITQYSTGQVSVEIEWELQKENSKRWNPEIQYTSNYNKSVNVDFTVDTNGVYSEPRPIGTRYLTRNL

SEQ ID NO: 30 - protein, 735 aa, adeno-associated virus 2
  misc_feature (57)..(57): Xaa can be any naturally occurring amino acid
  misc_feature (127)..(127): Xaa can be any naturally occurring amino acid
  misc_feature (131)..(131): Xaa can be any naturally occurring amino acid
  misc_feature (690)..(690): Xaa can be any naturally occurring amino acid
MAADGYLPDWLEDTLSEGIRQWWKLKPGPPPPKSAERHKDDSRGLVLPGYKYLGPFXGLDKGEPVNEADAAALEHDKAYDRQLDSGDNPYLKYNHADAEFQERLKEDTSFGGNLGRAVFQAKKRVLXPLGXVEEPVKTAPGKKRPVEHSPVEPDSSSGTGKAGQQPARKRLNFGQTGDSDSSSRDMRKVFSAAAPTSLGSTTMASGGGAPVADNNEGADGVGNSSGNWHCDSQWLGDRVITTSTRTWALPTYNNHLYKQISSQSGASNDNHYFGYSTPWGYFDFNRFHCHFSPRDWQRLINNNWGFRPKRLNFKLFNIQVKEVTQNDGTTTIANNLTSTVQVFTDSEYQLPYVLGSAHQGCLPPFPADVFMVPQYGYLTLNNGSQAVGRSSFYCLEYFPSQMLRTGNNFQFSYTFEDVPFHSSYAHSQSLDRLMNPLIDQYLYYLNKTQTNSGTLQQSRLLFSQAGPTNMSLQAKNWLPGPCYRQQRLSKQANDNNNSNFPWTAATKYHLNGRDSLVNPGPAMASHKDDEEKFFPQSGVLIFGKQGSEKTNVDIEKVMITDEEEIRTTNPVATEQYGSVSTNLQRGNRQAATADVNTQGVLPGMVWQDRDVYLQGPIWAKIPHTDGHFHPSPLMGGFGLKHPPPQILIKNTPVPANPSTTFSAAKFASFITQYSTGQVSVEIEWELQKEXSKRWNPEIQYTSNYNKSVNVDFTVDTNGVYSEPRPIGTRYLTRNL

SEQ ID NO: 31 - protein, 735 aa, adeno-associated virus 2
  misc_feature (40)..(40): Xaa can be any naturally occurring amino acid
  misc_feature (345)..(345): Xaa can be any naturally occurring amino acid
  misc_feature (362)..(362): Xaa can be any naturally occurring amino acid
  misc_feature (387)..(387): Xaa can be any naturally occurring amino acid
MAADGYLPDWLGETLSQGIRQWWKLKPGPPPPKPAERHKXDSRGLVLPGYKYLGPFNGLDKGEPVNEADAAALEHDKAYDRQLDSGHIPYLKYNHADAEFQERLKEDTSFGGNLGRAVFQAKKRVLEPLGLVEEPVKTAPGKKRPVEHSPVEPDSSSGTGKAGQQPARKRLNFGQTGDADSVPDPQPLGQPPAAPSGLGTTTMATGSGAPVADNNEGADGVGNSSGNWHCDSQWLGDRVITTSTRTWALPTYNNHLYNFFQIKINASNDNHYFGYSTPWGYFDFNRFHCHFSPRDWQRLINNNWGFRPKRLNFKLFLIQVKEVTQNDGTTTIANNLTSTVQVFTXSEYQLPYVLGSAHQGCXPPFPADVFMVPQYGYLTLNNGSQAXGRSSFYCLEYFPSQMLRTGNNFQFSYTFEDVPFHSSYAHSQSLDRLMNPLIDQYLYYLNKTQSNSGTLQQSRLLFSQAGPTSMSLQAKNWLPGPCYRQQRVSKTSADNNNSEYSWTGATKYHLNGRDSLVNPGPAMASHKDDEEKFFPQSGVLIFGKQGSEKTNVDIEKVMITDEEEIRTTNPVATEQYGYVSNNLQNSNRQAATADVNTQGVLPGMVWQDRDVYLQGPIWAKIPHTDGHFHPSPLMGGFGLKHPPPQILIKNTPVPANPPTNFSSAKFASFITQYSTGQVSVEIEWELQKENSKRWNPEIQYTSNYNKSVNVDFTVDTNGVYSEPRPIGTRYLTRNL

SEQ ID NO: 32 - protein, 735 aa, adeno-associated virus 2
MAADGYLPDWLEDTPSAGISQWWKLKPGPPPPKPAERHKDDSRGLVLPGYKYLGPFNGLDKGEPVNEADAAALEHDKAYDRQLDSGDNPYLKYNHADAEFQERLKEDTSFGGNLGRAVFQAKKRVLEPLGLVEEPVKTAPGKKRPVEHSPVEPDSSSGTGKAGQQPARKRLNFGQTGDADSVPDPQPLGQPPAAPSGLGTNTMATGSGAPMADNNEGADGVGNSSGNWHCDSQWLGDRVITTSTRTWALPTYNNHLYKQISSQSGASNDNHYFGYSTPWGYFDFNRFHCHFSPRDWQRLINNNWGFRPKKLNFKLFNIQVKEVTQNDGTTTIANNLTSTVQVFTGSGYGLRYVLGSAHQGCLPPFPADVFMVPQYGYLTLNNGSQAVGRSSFYCLEYFPSQMLRTGNNFQFSYTFEDVPFHSSYAHSQSLDRLMNPLIDQYLYYLNKTQSNSGTLQQSRLQFSQAGASDIRDQSRNWLPGPCYRQQRVSKTSADNNNSEYSWTGATKYHLNGRDSLVNPGPAMASHKDDEEKFFPQSGVLIFGKQGSEKTNVDIEKVMITDEEEIRTTNPVATEQYGYVSNNLQNSNTGPTTGTVNHQGALPGMVWQDRDVYLQGPIWAKIPHTDGHFHPSPLMGGFGLKHPPPQIMIKNTPVPANPPTNFSSAKFASFITQYSTGQVSVEIEWELQKENSKRWNPEIQYTSNYNKSVNVDFTVDTNGVYSEPRPIGTRYLTRNL

SEQ ID NO: 33 - protein, 735 aa, adeno-associated virus 2
  misc_feature (330)..(330): Xaa can be any naturally occurring amino acid
  misc_feature (652)..(652): Xaa can be any naturally occurring amino acid
MAADGYLPDWLEDTLSEGIRQWWKLKPGPPPPKPAERHKDDSRGLVLPGYKYLGPFNGLDKGEPVNEADAAALEHDKAYDRQLDSGDNPYLKYNHADAEFQERLKEDTSFGGNLGRAVFQAKKRVLEPLGLVEEPVKTAPGKKRPVEHSPVEPDSSSGTGKAGQQPARKRLNFGQTGDADSVPDPQPLGQPPAAPSGLGTNTMATGSGAPMEDNNEGADGVGNSSGNWHCDSQWLGDRVITTSTRTWALPTYNNHLYKQICSQSGASNDNHYFGYSTRWGDFDFNRFHCHFSPRDWQRLINNNWGFRPKRLNFKLFNIQVKEVTQNDGTXTIANNLTSTVQVFTDSEYQLPYVLGSAHQGCLPPFPADVFMVPQYGYLTLNNGSQAVGRSSFYCLEYFPSQMLRTGNNFTFSYTFEDVPFHSSYAHSQSLDRLMNPLIDQYLYYLSRTNTPSGTTTQSRLLFSQAGPTSMSLQAKNWLPGPCYRQQRLSKQANDNNNSNFPWTAATKYHLNGRDSLVNPGPAMASHKDDEEKFFPQSGVLIFGKQGSEKTNVDIEKVMITDEEEIRTTNPVATEQYGYVSNNLQNSNTGPTTGTVNHQGALPGMVWQDRDVYLQGPIWAKIPHTDGHFHPSPLMGGFGLKHPPPQIMIKSSXVPANPPTNFSSAKFASFITQYSTGQVSVEIEWELQKENSKRWNPEIQYTSNYNKSVNVDFTVDTNGVYSEPRPIGTRYLTRNL

SEQ ID NO: 34 - protein, 735 aa, adeno-associated virus 2
  misc_feature (707)..(707): Xaa can be any naturally occurring amino acid
  misc_feature (723)..(723): Xaa can be any naturally occurring amino acid
  misc_feature (727)..(727): Xaa can be any naturally occurring amino acid
  misc_feature (730)..(730): Xaa can be any naturally occurring amino acid
MAADGYLPDWLEDTLSEGIRQWWKLKPGPPPPKPAERHKDNSRGLVLPGYKYLGPFNGLDKGEPVNEADAAALEHDKAYDRQLDSGDNPYLKYNHADAEFQERLKEDTSFGGNLGRAVFQAKKRVLEPLGLVEEPVKTAPGKKRPVEHSPVEPDSSSGTGKAGQQPAKKRLKFGQTGDADSVPDPQPLGQPPAAPSGLGSTTMATGSGAPMADNNEGADGVGNSSGNWHCDSTWMGDRVITTSTRTWALPTYNNHLYKQISSQSGASNDNHYFGYSTPWGYFDFNRFHCHFSPRDWQRLINNNWGFRPKRLNFKLFNIQVKEVTQNDGTTTIANNLTSTVQVFTDSEYQLPYVLGSAHQGCLPPFPADVFMVPQYGYLTLNNGSQAVGRSSFYCLEYFPSQMLRTGNNFTFSYTFEDVPFHSSYAHSQSLDRLMNPLIDQYLYYLNKTQSNSETTFSSATPLKTFLSTAATLTARVWLPGPCYRQQRLSKQANDNNNSNFPWTAATKYHLNGRDSLVNPGPAMASHKDDEEKFFPQSGVLIFGKQGSEKTNVDIEKVMITDEEEIRTTNPVATEQYGYVSNNLQNSNTGPTTGTVNHQGALPGMVWQDRDVYLQGPIWAKIPHTDGHFHPSPLMGGFGLKHPPPQIMIKNTPVPANPPTNFSSAKFASFITQYSTGQVRVEIEWELQKENSKRWNPEIQYTSNYNKXVNVDFTVDTNGVYSEXRPIXTRXLTRNL

SEQ ID NO: 35 - protein, 735 aa, adeno-associated virus 2
MAADGYLPDWLEDTLSEGIRQWWKLKPGPPPPKPAERHKDDSRGLVLPGYKYLGPFNGLDKGEPVNEADAAALEHDKAYDRQLDSGDNPYLKYNHADAEFQERLKEDTSFGGNLGRAVFQAKKRVLEPLGLVEEPVKTAPGKKRPVEHSPVEPDSSSGTGKAGQQPARKRLNFGQTGDADSVPDPQPLGQPPAAPSGLGSTTMATGSGAPVADNNEGADGVGNSSGNWHCDSQWLGDRVITTSTRTWALPTYNNHLYKQISSQSGASNDNHYFGYSTPWGYFDFNRFHCHFSPRDWQRLINNNWGFRPKRLNFKLFNIQVKEVTQNDGTKTPANNLTSTVQVFTDSEYQLPYVLGSAHQGCLPPFPADVFMVPQYGYLTLNNGSQAVGRSSFYCLEYFPSQMLRTGNNFTFSYTFEDVPFHSSYAHSQSLDRLMNPLIDQYLYYLNKTQSNSGTNTQSRLQFSQAGASDIRDQSRNWLPGPCYRQQRLSKQANDNNNSNFPWTGATKYHLNGRDSLVNPGPAMASHKDDEEKFFPMHGTLIFGKQGTNANDADLDNVMITDEEEIRTTNPVATEQYGYVSNNLQNSNTGPTTGTVNHQGALPGMVWQDRDVYLQGPIWAKIPHTDGHFHPSPLMGGFGLKHPPPQIMIKNTPVPANPPTNFSSAKFASFITQYSTGQVSVEIEWELQKENSKRWNPEIQYTSNYNKSVNVDFTVDTNGVYSEPRPIGTRYLTRNL

SEQ ID NO: 36 - protein, 732 aa, adeno-associated virus 2
MAADGYLPDWLEDTLSEGIRQWWKLKPGPPPPKPAERHKDDSRGLVLPGYKYLGPFNGLDKGEPVNEADAAALEHDKAYDRQLDSGDNPYLKYNHADAEFQERLKEDTSFGGNLGRAVFQAKKRVLEPLGLVEEPVKTAPGKKRPVEHSPAEPDSSSGTGKAGQQPARKRLNFGQTGDADSVPDPQPLGQPPAAPSGLGSTTMATGSGAPVADNNEGADGVGNSSGNWHCDSQWLGDRVITTSTRTWALPTYNNHLYKQISSQSGASNHYFGYSTPWGYFDFNRFHCHFSPRDWQRLINNNWGFRPKRLNFKLFNIQVKEVTQNDGTTTIANNLTSTVQVFTDSEYQLPYVLGSAHQGCLPPFPADVFMVPQYGYLTLNNGSQAVGRSSFYCLEYFPSQMLRTGNNFTFSYTFEDVPFHSSYAHSQSLDRLMNPLIDQYLYYLNKTQSSGTLQQSRLLFSQAGPTSMSLQARNWLPGPCYRQQRVSKTSADKNNSEYSWTAATKYHLNGRDSLVNPGPAMASHKDDEEKFFPMPGTLIFGKEGTNANNAELENVMITDEEEIRTTNPVATEQYGYVSNNLQNSNTGPTTGTVNHQGALPGMVWQDRDVYLQGPIWAKIPHTDGHFHPSPLMGGFGLKHPPPQIMIKNTPVPANPPTNFSAAKFASFITQYSTGQVSVEIEWELQKENSKRWNPEIQYTSNYNKSVNVDFTVDTNGVYSEPRPIGTRYLTRNL

SEQ ID NO: 37 - protein, 735 aa, adeno-associated virus 2
MAADGYLPDWLEDTLSEGIRQWWKLKPGPPPPKPAERHKDDSRGLVLPGYKYLGPFNGLDKGEPVNEADAAALEHDKAYDRQLDSGDNPYLKYNHADAEFQERLKEDTSFGGNLGRAVFQAKKRVLEPLGLVEEPVKTAPGKKRPVEHSPAEPDSSSGTGKAGQQPARKRLNFGQTGDADSVPDPQPLGQPPAAPSGLGSTTMATGSGAPVADNNEGADGVGNSSGNWHCDSQWLGDRVITTSTRTWALPTYNNHLYKQISSQSGASNDNHYFGYSTPWGYFDFNRFHCHFSPRDWQRLINNNWGFRPKRLNFKLFNIQVKEVTQNDGTTTIANNLTSTVQVFTDSEYQLPYVLGSAHQGCLPPFPADVFMVPQYGYLTLNNGSQAVGRSSFYCLEYFPSQMLRTGNNFQFSYTFEDVPFHSSYAHSQSLDRLMNPLIDQYLYYLNKTQSNSGTLQQSRLLFSQAGASDIRDQSRNWLPGPCYRQQRVSKTSADNNNSNFPWTAATKYHLNGRDSLVNPGPAMASHKDDEEKFFPMHGTLIFGKQGTNANDADLDNVMITDEEEIRTTNPVATEQYGYVSNNLQNSNTGPTTGTVNHQGALPGMVWQDRDVYLQGPIWAKIPHTDGHFHPSPLMGGFGLKHPPPQIMIKNTPVPANPPTNFSSAKFASFITQYSTGQVSVEIEWELQKENSKRWNPEIQYTSNYNKSVNVDFTVDTNGVYSEPRPIGTRYLTRNL

SEQ ID NO: 38 - protein, 734 aa, adeno-associated virus 2
  misc_feature (128)..(129): Xaa can be any naturally occurring amino acid
  misc_feature (517)..(517): Xaa can be any naturally occurring amino acid
  misc_feature (526)..(526): Xaa can be any naturally occurring amino acid
  misc_feature (530)..(530): Xaa can be any naturally occurring amino acid
MAADGYLPDWLEDTLSEGIRQWWKLKPGPPPPKPAERHKDDSRGLVLPGYKYLGPFNGLDKGEPVNEADAAAIEHDKAYDRQLDSGDNPYLKYNHADAEFQERLKEDTSFGGNLGRAVFQAKKRVLEXXGLVEEPVKTAPGKKRPVAHSPAEPDSSSGTGKAGNQPARKRLNFGQTGDADSVPDPQPLGQPPAAPTSLGSTTMATGSGAPMADNNEGADGVGNSSGNWHCDSTWMGDRVITTSTRTWALPTYNNHLYKQISSQSGASNDNHYFGYSTPWGYFDFNRFHCHFSPRDWQRLINNNWGFRPKRLNFKLFNIQVKEVTQNDGTTTIANNLTSTVQVFTDSEYQLPYVLGSAHQGCLPPFPADVFMVPQYGYLTLNNGSQAVGRSSFYCLEYFPSQMLRTGNNFQFSYTFEDVPFHSSYAHSQSLDRLMNPLIDQYLYYLNRTQTASGTQQSRLLFSQAGPTSMSLQAKNWLPGPCYRQQRLSKQANDNNNSNYSWTGATKYHLNGRDSLVXPGPAMASHXDDEXKFFPMHGTLIFGKEGTNATNADLDNVMITDEEEIRTTNPVATEQYGYVSNNLQNSNTAATTETVNHQGALPGMVWQDRDVYLQGPIWAKIPHTDGHFHPSPLMGGFGLKNPPPQIMIKNTPVPANPPTNFSSAKFASFITQYSTGQVSVEIEWELQKENSKRWNPEIQYTSNYNKSVNVDFTVDTNGVYSEPRPIGTRYLTRNL

SEQ ID NO: 39 - protein, 735 aa, adeno-associated virus 2
MAADGYLPDWLEDTLSEGIRQWWKLKPGPPPPKPAERHKDDSRGLVLPGYKYLGPFNGLDKGEPVNEADAAALEHDKAYDRQLDSGDNPYLKYNHADAEFQERLKEDTSFGGNLARAVFQAKKRVLEPLGLVEEPVKTAPGKKRPVEHSPAEPDSSSGTGKSGNQPARKRLNFGQTGDADSVPDPQPLGQPPAAPSGLGSTTMATGSGAPVADNNEGADGVGNSSGNWHCDSQWLGDRVITTSTRTWALPTYNNHLYKQISSQSGASNDNHYFGYSTPWGYFDFNRFHCHFSPRDWQRLINNNWGFRPKRLNFKLFNIQVKEVTQNDGTTTIANNLTSTVQVFTDSEYQLPYVLGSAHQGCLPPFPADVFMVPQYGYLTLNNGSQAVGRSSFYCLEYFPSQMLRTGNNFTFSYTFEDVPFHSSYAHSQSLDRLMNPLIDQYLYYLNKTQTNSGTLQQSRLLFSQAGPTSMSLQAKNWLPGPCYRQQRLSKQANDNNNSNFPWTAATKYHLNGRDSLVNPGPAMASHKDDEEKFFPMHGTLIFGKQGTNANDADLENVMITDEEEIRTTNPVATEQYGYVSNNLQNSNTGPTTGTVNHQGALPGMVWQDRDVYLQGPIWAKIPHTDGHFHPSPLMGGFGLKHPPPQIMIKNTPVPANPPTNFSSAKFASFITQYSTGQVSVEIEWELQKENSKRWNPEIQYTSNYNKSVNVDFTVDTNGVYSEPRPIGTRYLTRNL

SEQ ID NO: 40 - protein, 736 aa, adeno-associated virus 2
  misc_feature (164)..(164): Xaa can be any naturally occurring amino acid
  misc_feature (168)..(168): Xaa can be any naturally occurring amino acid
  misc_feature (178)..(178): Xaa can be any naturally occurring amino acid
MAADGYLPDWLQENLFFDIRQWWKLKPGPPPPKPAERHQDNSRGLVLPGYKYLGPFNGLDKGEPVNEADAAALEHDKAYDRQLDSGDNPYLKYNHADAEFQERLKEDTSFGGNLGRAVFQAKKRVLEPLGLVEEPVKTAPGKKRPVEHSPAEPDSSSGTGKAGXQPAXKRLNFGQTGXADSVPDPQPLGQPPAAPSGLGTNTMATGSGAPVADNNEGADGVGNSSGNWHCDSQWLGDRVITTSTRTWALPTYNNHLYKQISSQSGASNDNHYFGYSTPWGYFDFNRFHCHFSPRDWQRLINNNWGFRPKRLNFKLFNIQVKEVTQNDGTTTIANNLTSTVQVFTDSEYQLPYVLGSAHQGCLPPFPADVFMVPQYGYLTLNNGSQAVGRSSFYCLEYFPSQMLRTGNNFQFSYTFEDVPFHSSYAHSQSLDRLMNPLIDQYLYYLNKTQSNSGTLQQSRLLFSQAGPTSMSLQAKNWLPGPCYRQQRLSKQANDNNKAGKRQQQQQLSLDCGYKVSTKWPGPAMASHKDDEEKFFPMHGTLIFGKQGTNANDADLDNVMITDEEEIRTTNPVATEQYGYVSNNLQNSNTGPTTGTVNHQGALPGMVWQDRDVYLQGPIWAKIPHTDGHFHPSPLMGGFGLKHPPPQIMIKNTPVPANPPTNFSSAKFASFITQYSTGQVSVEIEWELQKENSKRWNPEIQYTSNYNKSVNVDFTVDTNGVYSEPRPIGTRYLTRNL

SEQ ID NO: 41 - protein, 735 aa, adeno-associated virus 2
MAADGYLPDWLEDTLSEGIRQWWKLKPGPPPPKPAERHKDDSRGLVLPGYKYLGPFNGLDKGEPVNEADAAALEHDKAYDRQLDSGDNPYLKYNHADAEFQERLKEDTSFGGNLGRAVFQAKKRVLEPLGLVEEPVKTAPGKKRPVEHSPVEPDSSSGTGKAGQQPARKRLNFGQTGDADSVPDPQPLGQPPAAPSGLGSTTMATGSGAPMADNNEGADGVGNSSGNWHCDSQWLGDRVITTSTRTWALPTYNNHLYKQISSQSGASNDNHYFGYSTPWGYFDFNRFHCHFSPRDWQRLINNNWGFRPKRLNFKLFNIQVKEVTQNDGTTTIANNLTSTVQVFTDSEYQLPYVLGSAHQGCLPPFPADVFMVPQYGYLTLNNGSQAVGRSSFYCLEYFPSQMLRTGNNFQFSYTFEDVPFHSSYAHSQSLDRLMNPLIDQYLYYLNKTQSNSGTLQQSRLLFSQAGPTSMSLQAKNWLPGPCYRQQRLSKQANDNNNSNFPWTAATKYHLNGRDSLVNPGPAMASHKDDEEKFFPMHGTLIFGKQGTNANDADLDNVMITDEEEIRTTNPVATEQYGYVSNNLQSGNTQAATGTVNHQGALPGMVWQDRDVYLQGPIWAKIPHTDGHFHPSPLMGGFGLKHPPPQIMIKNTPVPANPPTNFSSAKFASFITQYSTGQVSVEIEWELQKENSKRWNPEIQYTSNYNKSVNVDFTVDTNGVYSEPRPIGTRYLTRNL

SEQ ID NO: 42 - protein, 735 aa, adeno-associated virus 2
MAADGYLPDWLEDTLSEGIRQWWKLKPGPPPPKPAERHKDDNRGLVLPGYKYLGPFNGLDKGEPVNEADAAALEHDKAYDRQLDSGDNPYLKYNHADAEFQERLKEDTSFGGNLGRAVFQAKKRVLEPLGLVEEPVKTAPGKKRPVEHSPVEPDSSSGTGKAGQQPARKRLNFGQTGDADSVPDPQPLGQPPAAPSGLGSTTMATGSGAPMADNNEGADGVGNSSGNWHCDSQWLGDRVITTSTRTWALPTYNNHLYKQISSQSGASNDNHYFGYSTPWGYFDFNRFHCHFSPRDWQRLINNNWGFRPKRLNFKLFNIQVKEVTQNDGTTTIANNLTSTVQVFTDSEYQLPYVLGSAHQGCLPPFPADVFMVPQYGYLTLNNGSQAVGRSSFYCLEYFPSQMLRTGNNFQFSYTFEDVPFHSSYAHSQSLDRLMNPLIDQYLYYLNKTQSNSGTLQQSRLLFSQAGPTSMSLQAKNWLPGPCYRQQRLSKQANDNNNSNFPWTAATKYHLNGRDSLVNPGPAMASHKDDEEKFFPMHGTLIFGKQGTNANDADLDNVMITDEEEIRTTNPVATEQYGYVSNNLQNSNTGPTTGTVNHQGALPGMVWQDRDVYLQGPIWAKIPHTDGHFHPSPLMGGFGLKHPPPQIMIKNTPVPANPPTNFSSAKFASFITQYSTGQVSVEIEWELQKENSKRWNPEIQYTSNYNKSVNVDFTVDTNGVYSEPRPIGTRYLTRNL

SEQ ID NO: 43 - protein, 735 aa, adeno-associated virus 2
MAADGYLPDWLEDTLSEGIRQWWKLKPGPPPPKPAERHKDDSRGLVLPGYKYLGPFNGLDKGEPVNEADAAALEHDKAYDRQLDSGDNPYLKYNHADAEFQERLKEDTSFGGNLGRAVFQAKKRVLEPLGLVEEPVKTAPGKKRPVEHSPVEPDSSSGTGKAGQQPARKRLNFGQTGDADSVPDPQPLGQPPAAPSGLGSTTMATGSGAPVADNNEGADGVGNSSGNWHCDSQWLGDRVITTSTRTWALPTYNNHLYKQISSQSGASNDNHYFGYSTPWGYFDFNRFHCHFSPRDWQRLINNNWGFRPKRLNFKLFNIQVKEVTQNDGTTTIANNLTSTVQVFTDSEYQLPYVLGSAHQGCLPPFPADVFMVPQYGYLTLNNGSQAVGRSSFYCLEYFPSQMLRTGNNFQFSYTFEDVPFHSSYAHSQSLDRLMNPLIDQYLYYLNKTQSNSGTLQQSRLLFSQAGPTSMSLQAKNWLPGPCYRQQRLSKQANDNNNSNFPWTAATKYHLNGRDSLVNPGPAMASHKDDEEKFFPMHGTLIFGKQGTNANDADLDNVMITDEEEIRTTNPVATEQYGYVSNNLQNSNTGPTTGTVNHQGALPGMVWQDRDVYLQGPIWAKIPHTDGHFHPSPLMGGFGLKHPPPQIMIKNTPVPANPPTNFSSAKFASFITQYSTGQVSVEIEWELQKENSKRWNPEIQYTSNYNKSVNVDFTVDTNGVYSEPRPIGTRYLTRNL

SEQ ID NO: 44 - protein, 735 aa, adeno-associated virus 2
MAADGYLPDWLEDTLSEGIRQWWKLKPGPPPPKPAERHKDDSRGLVLPGYKYLGPFNGLDKGEPVNEADAAALEHDKAYDRQLDSGDNPYLKYNHADAEFQERLKEDTSFGGNLGRAVFQAKKRVLEPLGLVEEPVKTAPGKKRPVEHSPVEPDSSSGTGKAGQQPARKRLNFGQTGDADSVPDPQPLGQPPAAPSGLGSTTMATGSGAPMADNNEGADGVGNSSGNWHCDSQWLGDRVITTSTRTWALPTYNNHLYKQISSQSGASNDNHYFGYSTPWGYFDFNRFHCHFSPRDWQRLINNNWGFRPKRLNFKLFNIQVKEVTQNDGTTTIANNLTSTVQVFTDSEYQLPYVLGSAHQGCLPPFPADVFMVPQYGYLTLNNGSQAVGRSSFYCLEYFPSQMLRTGNNFQFSYTFEDVPFHSSYAHSQSLDRLMNPLIDQYLYYLNKTQSNSGTLQQSRLLFSQAGPTSMSLQAKNWLPGPCYRQQRLSKQANDNNNSNFPWTAATKYHLNGRDSLVNPGPAMASHKDDEEKFFPMHGTLIFGKQGTNANDADLENVMITDEEEIRTTNPVATEQYGTVSNNLQNSNTGPTTGTVNHQGALPGMVWQDRDVYLQGPIWAKIPHTDGHFHPSPLMGGFGLKHPPPQIMIKNTPVPANPPTNFSSAKFASFITQYSTGQVSVEIEWELQKENSKRWNPEIQYTSNYNKSVNVDFTVDTNGVYSEPRPIGTRYLTRNL

SEQ ID NO: 45 - protein, 735 aa, adeno-associated virus 2
MAADGYLPDWLEDTLSEGIRQWWKLKPGPPPPKPAERHKDDSRGLVLPGYKYLGPFNGLDKGEPVNEADAAALEHDKAYDRQLDSGDNPYLKYNHADAEFQERLKEDTSFGGNLGRAVFQAKKRVLEPLGLVEEPVKTAPGKKRPVEHSPVEPDSSSGTGKAGQQPARKRLNFGQTGDADSVPDPQPLGKPPAAPSGLGSTTMATGSGAPMADNNEGADGVGNSSGNWHCDSQWLGDRVITTSTRTWALPTYNNHLYKQISSQSGASNDNHYFGYSTPWGYFDFNRFHCHFSPRDWQRLINNNWGFRPKRLNFKLFNIQVKEVTQNDGTTTIANNLTSTVQVFTDSEYQLPYVLGSAHQGCLPPFPADVFMVPQYGYLTLNNGSQAVGRSSFYCLEYFPSQMLRTGNNFQFSYTFEDVPFHSSYAHSQSLDRLMNPLIDQYLYYLNKTQSNSGTLQQSRLLFSQAGPTSMSLQAKNWLPGPCYRQQRLSKQANDNNNSNFPWTAATKYHLNGRDSLVNPGPAMASHKDDEEKFFPMHGTLIFGKQGTNANDADLDNVMITDEEEIRTTNPVATEQYGYVSNNLQNSNTGPTTGTVNHQGALPGMVWQDRDVYLQGPIWAKIPHTDGHFHPSPLMGGFGLKHPPPQIMIKNTPVPANPPTNFSSSKFASFITQYSTGQVSVEIEWELQKENSKRWNPEIQYTSNYNKSVNVDFTVDTNGVYSEPRPIGTRYLTRNL

SEQ ID NO: 46 - protein, 735 aa, adeno-associated virus 2; identical to SEQ ID NO: 43

SEQ ID NO: 47 - protein, 736 aa, adeno-associated virus 2
  misc_feature (578)..(578): Xaa can be any naturally occurring amino acid
MAADGYLPDWLEDTLSEGIRQWWKLKPGPPPPKPAERHKDDSRGLVLPGYKYLGPFNGLDKGEPVNEADAAALEHDKAYDRQLDSGDNPYLKYNHADAEFQERLKEDTSFGGNLGRAVFQAKKRVLEPLGLVEEPVKTAPGKKRPVEHSPVEPDSSSGTGKAGQQPARKRLNFGQTGDADSVPDPQPLGQPPAAPSGLGSTTMATGSGAPVADNNEGADGVGNSSGNWHCDSQWLGDRVITTSTRTWALPTYNNHLYKQISSQSGASNDNHYFGYSTPWGYFDFNRFHCHFSPRDWQRLINNNWGFRPKRLNFKLFNIQVKEVTQNDGTTTIANNLTSTVQVFTDSEYQLPYVLGSAHQGCLPPFPADVFMVPQYGYLTLNNGSQAVGRSSFYCLEYFPSQMLRTGNNFQFSYTFEDVPFHSSYAHSQSLDRLMNPLIDQYLYYLNKTQANSGTLQQSRLLFSQAGPTSMSLQAKNWLPGPCYRQQRLSKQANDNNNSNFPWTAATKYHLNGRDSLVNPGPAMASHKDDEEEKFFPMHGTLIFGKQGTNANDADLDNVMITDEEEIRTTNPVATEQYXYVSNNLQNSNTGPTTGTVNHQGALPGMVWQDRDVYLQGPIWAKIPHTDGHFHPSPLMGGFGLKHPPPQIMIKNTPVPSPLMGGFGLKHPPPQITQYSTGQVSVEIEWELQKENSKRWNPEIQYTSNYNKSVNVDFTVDTNGVYSEPRPIGTRYLTRNL

SEQ ID NO: 48 - protein, 735 aa, adeno-associated virus 2
MAADGYLPDWLEDTLSEGIRQWWKLKPGPPPPKPAERHKDDSRGLVLPGYKYLGPFNGLDKGEPVNEADAAALEHDKAYDRQLDSGDNPYLKYNHADAEFQERLKEDTSFGGNLGRAVFQAKKRVLEPLGLVEEPVKTAPGKKRPVEHSPVEPDSSSGTGKAGQQPARKRLNFGQTGDADSVPDPQPLGQPPAAPSGLGSTTMATGSGAPMADNNEGADGVGNSSGNWHCDSQWLGDRVITTSTRTWALPTYNNHLYKQISSQSGASNDNHYFGYSTPWGYFDFNRFHCHFSPRDWQRLINNNWGFRPKRLNFKLFNIQVKEVTQNDGTTTIANNLTSTVQVFTDSEYQLPYVLGSAHQGCLPPFPADVFMVPQYGYLTLNNGSQAVGRSSFYCLEYFPSQMLRTGNNFQFSYTFEDVPFHSSYAHSQSLDRLMNPLIDQYLYYLNKTQSNSGTLQQSRLLFSQAGPTSMSLQAKNWLPGPCYRQQRLSKQANDNNNSNFPWTAATKYHLNGRDSLVNPGPAMASHKDDEEKFFPMHGTLIFGKQGTNANDADLDNVMITDEEEIRTTNPVATEQYGYVSNNLQNSNTGPTTGTVNHQGALPGMVWQDRDVYLQGPIWAKIPHTDGHFHPSPLMGGFGLKHPPPQIMIKNTPVPANPPTNFSSAKFASFITQYSTGQVSVEIEWELQKENSKRWNPEIQYTSNYNKSVNVDFTVDTNGVYSEPRPIGTRYLTRNL

SEQ ID NO: 49 - protein, 735 aa, adeno-associated virus 2
MAADGYLPDWLEDTLSEGIRQWWKLKPGPPPPKPAERHKDDSRGLVLPGYKYLGPFNGLDKGEPVNEADAAALEHDKAYDRQLDSGDNPYLKYNHADAEFQERLKEDTSFGGNLGRAVFQAKKRVLEPLGLVEEPVKTAPGKKRPVEHSPAEPDSSSGIGKAGQQPARKRLNFGQTGDADSVPDPQPLGQPPAAPSGLGSTTMATGSGAPVADNNEGADGVGNSSGNWHCDSQWLGDRVITTSTRTWALPTYNNHLYKQISSQSGASNDNHYFGYSTPWGYFDFNRFHCHFSPRDWQRLINNNWGFRPKRLNFKLFNIQVKEVTQNDGTTTIANNLTSTVQVFTDSEYQLPYVLGSAHQGCLPPFPADVFMVPQYGYLTLNNGSQAVGRSSFYCLEYFPSQMLRTGNNFQFSYTFEDVPFHSSYAHSQSLDRLMNPLIDQYLYYLNKTQSNSGTLQQSRLLFSQAGPTSMSLQAKNWLPGPCYRQQRLSKQANDNNNSNFPWTAATKYHLNGRDSLVNPGPAMASHKDDEEKFFPMHGTLIFGKQGTNANDADLDNVMITDEEEIRTTNPVATEQYGYVSNNLQNSNTGPTTGTVNHQGALPGMVWQDRDVYLQGPIWAKIPHTDGHFHPSPLMGGFGLKHPPPQIMIKNTPVPANPPTNFSSAKFASFITQYSTGQVSVEIEWELQKENSKRWNPEIQYTSNYNKSVNVDFTVDTNGVYSEPRPIGTRYLTRNL

SEQ ID NO: 50 - protein, 735 aa, adeno-associated virus 2
MAADGYLPDWLEDTLSEGIRQWWKLKPGPPPPKPAERHKDNSRGLVLPGYKYLGPFNGLDKGEPVNEADAAALEHDKAYDRQLDSGDNPYLKYNHADAEFQERLKEDTSFGGNLGRAVFQAKKRVLEPLGLVEEPVKTAPGKKRPVEHSPVEPDSSSGTGKAGQQPAKKRLNFGQTGDADSVPDPQPLGQPPAAPSGLGSTTMATGSGAPMADNNEGADGVGNSSGNWHCDSQWLGDRVITTSTRTWALPTYNNHLYKQISSQSGASNDNHYFGYSTPWGYFDFNRFHCHFSPRDWQRLINNNWGFRPKRLNFKLFNIQVKEVTQNDGTTTIANNLTSTVQVFTDSEYQLPYVLGSAHQGCLPPFPADVFMVPQYGYLTLNNGSQAVGRSSFYCLEYFPSQMLRTGNNFQFSYTFEDVPFHSSYAHSQSLDRLMNPLIDQYLYYLNKTQSNSGTLQQSRLLFSQAGPTNMSLQAKNWLPGPCYRQQRLSKQANDNNNSNFPWTAATKYHLNGRDSLVNPGPAMASHKDDEEKFFPMHGTLIFGKQGTNANDADLDNVMITDEEEIRTTNPVATEQYGYVSNNLQNSNTGPTTGTVNHQGALPGMVWQDRDVYLQGPIWAKIPHTDGHFHPSPLMGGFGLKHPPPQIMIKNTPVPANPPTNFSSAKFASFITQYSTGQVSVEIEWELQKENSKRWNPEIQYTSNYNKSVNVDFTVDTNGVYSEPRPIGTRYLTRNL

SEQ ID NO: 51 - protein, 735 aa, adeno-associated virus 2
MAADGYLPDWLEDTLSEGIRQWWKLKPGPPPPKPAERHKDDSRGLVLPGYKYLGPFNGLDKGEPVNEADAAALEHDKAYDRQLDSGDNPYLKYNHADAEFQERLKEDTSFGGNLGRAVFQAKKRVLEPLGLVEEPVKTAPGKKRPVEHSPAEPDSSSGTGKAGNQPARKRLNFGQTGDADSVPDPQPIGQPPAAPTSLGSTTMATGSGAPMADNNEGADGVGNSSGNWHCDSQWLGDRVITTSTRTWALPTYNNHLYKQISSQSGASNDNHYFGYSTPWGYFDFNRFHCHFSPRDWQRLINNNWGFRPKRLNFKLFNIQVKEVTQNDGTTTIANNLTSTVQVFTDSEYQLPYVLGSAHQGCLPPFPADVFMVPQYGYLTLNNGSQAVGRSSFYCLEYFPSQMLRTGNNFQFSYTFEDVPFHSSYAHSQSLDRLMNPLIDQYLYYLNKTQSNSGTVQQSRLLFSQAGPTSMSLQAKNWLPGPCYRQQRLSKQASDNNNSNFPWTAATKYHLNGRDSLVNPGPAMASHKDDEEKFFPMHGTLIFGKEGTTSNNADLEHVMITDEEEIRTTNPVATEQYGNVSNNLQNSNTGPTTENVNNQGALPGMVWQDRDVYLQGPIWAKIPHTDGHFHPSPLMGGFGLKHPPPQIMIKNTPVPANPPTNFSAAKFASFITQYSTGQVSVEIEWELQKENSKRWNPEIQYTSNYNKSVNVDFTVDTNGVYSEPRPIGTRYLTRNL

SEQ ID NO: 52 - protein, 735 aa, adeno-associated virus 2; identical to SEQ ID NO: 51

SEQ ID NO: 53 - protein, 735 aa, adeno-associated virus 2
MAADGYLPDWLEDTLSEGIRQWWKLKPGPPPPKPAERHKDDSRGLVLPGYKYLGPFNGLDKGEPVNEADAAALEHDKAYDRQLDSGDNPYLKYNHADAEFQERLKEDTSFGGNLGRAVFQAKKRVLEPLGLVEEPVKTAPGKKRPVEHSPVEPDSSSGTGKAGNQPARKRLNFGQTGDADSVPDPQPLGQPPAAPSGLGSTTMATGSGAPVADNNEGADGVGNSSGNWHCDSQWLGDRVITTSTRTWALPTYNNHLYKQISSQSGASNDNHYFGYSTPWGYFDFNRFHCHFSPRDWQRLINNNWGFRPKRLNFKLFNIQVKEVTQNDGTTTIANNLTSTVQVFTDSEYQLPYVLGSAHQGCLPPFPADVFMVPQYGYLTLNNGSQAVGRSSFYCLEYFPSQMLRTGNNFQFSYTFEDVPFHSSYAHSQSLDRLMNPLIDQYLYYLNKTQSNSGTLQQSRLLFSQAGPTSMSLQAKNWLPGPCYRQQRLSKQANDNNNSNFPWTAATKYHLNGRDSLVNPGPAMASHKDDEEKFFPMHGTLIFGKQGTNANDADLDNVMITDEEEIRTTNPVATEQYGYVSNNLQNSNTGPTTGTVNHQGALPGMVWQDRDVYLQGPIWAKIPHTDGHFHPSPLMGGFGLKHPPPQIMIKNTPVPANPPTNFSSAKFASFITQYSTGQVSVEIEWELQKENSKRWNPEIQYTSNYNKSVNVDFTVDTNGVYSEPRPIGTRYLTRNL

SEQ ID NO: 54 - protein, 735 aa, adeno-associated virus 2; identical to SEQ ID NO: 43

SEQ ID NO: 55 - protein, 735 aa, adeno-associated virus 2; identical to SEQ ID NO: 43

SEQ ID NO: 56 - protein, 735 aa, adeno-associated virus 2
MAADGYLPDWLEDTLSEGIRQWWKLKPGPPPPKPAERHKDDSRGLVLPGYKYLGPFNGLDKGEPVNEADAAALEHDKAYDRQLDSGDNPYLKYNHADAEFQERLKEDTSFGGNLGRAVFQAKKRVLEPLGLVEEPVKTAPGKKRPVEHSPVEPDSSSGTGKAGQQPARKRLNFGQTGDADSVPDPQPLGQPPAAPSGLGSTTMATGSGAPVADNNEGADGVGNSSGNWHCDSQWLGDRVITTSTRTWALPTYNNHLYKQISSQSGASNDNHYFGYSTPWGYFDFNRFHCHFSPRDWQRLINNNWGFRPKKLNFKLFNIQVKEVTQNDGTTTIANNLTSTVQVFTDSEYQLPYVLGSAHQGCLPPFPADVFMVPQYGYLTLNNGSQAVGRSSFYCLEYFPSQMLRTGNNFQFSYTFEDVPFHSSYAHSQSLDRLMNPLIDQYLYYLNKTQSNSGTLQQSRLLFSQAGPTSMSLQAKNWLPGPCYRQQRLSKQANDNNNSNFPWTAATKYHLNGRDSLVNPGPAMASHKDDEEKFFPMHGTLIFGKQGTNANDADLDNVMITDEEEIRTTNPVATEQYGYVSNNLQNSNTGPTTGTVNHQGALPGMVWQDRDVYLQGPIWAKIPHTDGHFHPSPLMGGFGLKHPPPQIMIKNTPVPANPPTNFSSAKFASFITQYSTGQVSVEIEWELQKENSKRWNPEIQYTSNYNKSVNVDFTVDTNGVYSEPRPIGTRYLTRNL

SEQ ID NO: 57 - protein, 735 aa, adeno-associated virus 2
MAADGYLPDWLEDTLSEGIRQWWKLKPGPPPPKPAERHKDDSRGLVLPGYKYLGPFNGLDKGEPVNEADAAALEHDKAYDRQLDSGDNPYLKYNHADAEFQERLKEDTSFGGNLGRAVFQAKKRVLEPLGLVEEPVKTAPGKKRPVEHSPAEPDSSSGTGKAGQQPARKRLNFGQTGDADSVPDPQPLGQPPAAPSGLGSTTMATGSGAPMADNNEGADGVGNSSGNWHCDSQWLGNRVITTSTRTWALPTYNNHLYKQISSQSGASNDNHYFGYSTPWGYFDFNRFHCHFSPRDWQRLINNNWGFRPKRLNFKLFNIQVKEVTQNDGTTTIANNLTSTVQVFTDSEYQLPYVLGSAHQGCLPPFPADVFMVPQYGYLTLNNGSQAVGRSSFYCLEYFPSQMLRTGNNFQFSYTFEDVPFHSSYAHSQSLDRLMNPLIDQYLYYLNKTQSNSGTLQQSRLLFSQAGPTSMSLQAKNWLPGPCYRQQRLSKQANDNNNSNFPWTAATKYHLNGRDSLVNPGPAMASHKDDEEKFFPMHGTLIFGKQGTNANDADLDNVMITDEEEIRTTNPVATEQYGYVSNNLQNSNTGPTTGTVNHQGALPGMVWQDRDVYLQGPIWAKIPHTDGHFHPSPLMGGFGLKHPPPQIMIKNTPVPANPPTNFSSAKFASFITQYSTGQVSVEIEWELQKENSKRWNPEIQYTSNYNKSVNVDFTVDTNGVYSEPRPIGTRYLTRNL

SEQ ID NO: 58 - protein, 735 aa, adeno-associated virus 2
MAADGYLPDWLEDTLSEGIRQWWKLKPGPPPPKPAERHKDDSRGLVLPGYKYLGPFNGLDKGEPVNEADAAALEHDKAYDRQLDSGDNPYLKYNHADAEFQERLKEDTSFGGNLGRAVFQAKKRVLEPLGLVEEPVKTAPGKKRPVEHSPVEPDSSSGTGKAGQQPARKRLNFGQTGDADSVPDPQPLGQPPAAPSGLGSTTMATGSGAPMADNNEGADGVGNSSGNWHCDSQWLGDRVITTSTRTWALPTYNNHLYKQISSQSGASNDNHYFGYSTPWGYFDFNRFHCHFSPRDWQRLINNNWGFRPKRLNFKLFNIQVKEVTQNDGTTTIANNLTSTVQVFTDSEYQLPYVLGSAHQGCLPPFPADVFMVPQYGYLTLNNGSQAVGRSSFYCLEYFPSQMLRTGNNFQFSYTFEDVPFHSSYAHSQSLDRLMNPLIDQYLYYLNKTQSNSGTLQQSRLLFSQAGPTSMSLQAKNWLPGPCYRQQRLSKQANDNNNSNFPWTAATKYHLNGRDSLVNPGPAMASHKDDEEKFFPMHGTLIFGKQGTGRDNADLDNVMITDEEEIRTTNPVATEQYGYVSNNLQNSNTGPTTGTVNHQGALPGMVWQDRDVYLQGPIWAKIPHTDGHFHPSPLMGGFGLKHPPPQIMIKNTPVPANPPTNFSSAKFASFITQYSTGQVSVEIEWELQKENSKRWNPEIQYTSNYNKSVNVDFTVDTNGVYSEPRPIGTRYLTRNL

SEQ ID NO: 59 - protein, 735 aa, adeno-associated virus 2
  misc_feature (196)..(196): Xaa can be any naturally occurring amino acid
MAADGYLPDWLEDTLSEGIRQWWKLKPGPPPPKPAERHKDDSRGLVLPGYKYLGPFNGLDKGEPVNEADAAALEHDKAYDRQLDSGDNPYLKYNHADAEFQERLKEDTSFGGNLGRAVFQAKKRVLETLGLVEEHVKTAPGKKRAVEHAHVEPDSSSGTGKAGQQPARKRLNFGQTGDADSVPDPQPLGQPPAAPXGLGSTTMASGSGAPMADNNEGADGVGNSSGNWHCDSQWLGDRVITTSTRTWALPTYNNHLYKQISSQSGASNDNHYFGYSTPWGYFDFNRFHCHFSPRDWQRLINNNWGFRPKRLNFKLFNIQVKEVTQNDGTTTIANNLTSTVQVFTDSEYQLPYVLGSAHQGCLPPFPADVFMVPQYGYLTLNNGSQAVGRSSFYCLEYFPSQMLRTGNNFQFSYTFEDVPFHSSYAHSQSLDRLMNPLIDQYLYYLNKTQSNSGTLQQSRLLFSQAGPTSMSLQAKNWLPGPCYRQQRLSKQATDNNNSEFPWTAATKYHLNGRDSLVNPGPAMASHKDDEEKFFPMHGTLIFGKQGTKCNDADLDNVMITDEEEIRTTNPVATEQYGYVSNNLQNSNTGPTTGTVNHQGALPGMVWQDRDVYLQGPIWAKIPHTDGHFHPSPLMGGFGLKHPPPQIMIKNTPVPANPPTNFSSAKFASFITQYSTGQVSVEIEWELQKENSKRWNPEIQYTSNYNKSVNVDFTVDTNGVYSEPRPIGTRYLTRNL

SEQ ID NO: 60 - protein, 735 aa, adeno-associated virus 2
MAADGYLPDWLEDTLSEGIRQWWKLKPGPPPPKPAERHKDDSRGLVLPGYKYLGPFNGLDKGEPVNEADAAALEHDKAYDRQLDSGDNPYLKYNHADAEFQERLKEDTSFGGNLGRAVFQAKKRVLEPLGLVEEPVKTAPGKKRPVEHSPVEPDSSSGTGKAGQQPARKRLNFGQTGPYASVPDPQPLGQPPAAPSGLGTNTMATGSGAPMADNNEGADGVGNSSGNWHCDSTWMGDRVITTSTRTWALPTYNNHLYKQISSQSGASNDNHYFGYSTPWGYFDFNRFHCHFSPRDWQRLINNNWGFRPKRLNFKLFNIQVKEVTQNDGTTTIANNLTSTVQVFTDSEYQLPYVLGSAHQGCLPPFPADVFMVPQYGYLTLNNGSQAVGRSSFYCLEYFPSQMLRTGNNFTFSYTFEDVPFHSSYAHSQSLDRLMNPLIDQYLYYLSRTNTPSGTTTQSRLQFSQAGASDIRDQSRNWLPGPCYRQQRVSKTAADNNNSEYSWTGATKYHLNGRDSLVNPGPAMASHKDDEEKFFPQSGVLIFGKQGSEKTNVDIEKVMITDEEEIRTTNPVATEQYGAVSTNLQSGNTQAATSDVNTQGVLPGMVWQDRDVYLQGPIWAKIPHTDGHFHPSPLMGGFGLKHPPPQILIKNTPVPANPSTTFSAAKFASFITQYSTGQVSVEIEWELQKENSKRWNPEIQYTSNYNKSVNVDFTVDTNGVYSEPRPIGTRYLTRNL

SEQ ID NO: 61 - protein, 736 aa, adeno-associated virus 2
MAADGYLPDWLEDTLSEGIRQWWKLKPGPPPPKPAERHKDDSRGLVLPGYKYLGPFNGLDKGEPVNEADAAALEHDKAYDRQLDSGDNPYLKYNHADAEFQERLKEDTSFGGNLGRAVFQAKKRVLEPLGLVEEPVKTAPGKKRPVEHSPAEPDSSSGTGKAGNQPARKRLNFGQTGDADSVPDPQPLGEPPAAPTSLGSTTMASGGGAPVADNNEGADGVGNSSGKLALRFPMAGRQSHYHQHPNLGPAHLQQPSVQANFQPIRSQQRQPLILAHCNPWGYFDFNRFHCHFSPRDWQRLINNNWGFRPKRLNFKLFNIQVKEVTQNDGTTTIANNLTSTVQVFTDSEYQIPYVLGSAHQGCLPPFPADVFMVPQYGYLTLNNGSQAVGRSSFYCLEYFPSQMLRTGNNFQFSYTFEDVPFHSSYAHSQSLDRLMNPLIDQYLYYLNKTQSASGTVQQSRLLFSQAGPTSMSLQAKNWLPGPCYRQQRLSKQANENNNSNFPWTAATKYHLNGRDSLVNPGPAMASHKDDEEKFFPMHGTLIFGKQGTGRDNADLDNVMITDEEEIRTTNPVATEQYGYVSNNLQNSNTAPSTGTVNHQGALPGMVWQDRDVYLQGPIWAKIPHTDGHFHPSPLMGGFGLKHPPPQIMIKNTPVPANPPTNFSAAKFASFITQYSTGQVSVEIEWELQKENSKRWNPEIQYTSNYNKSVNVDFTVDTNGVYSEPRPIGTRYLTRNL

SEQ ID NO: 62 - DNA, 4679 bp, adeno-associated virus 2
ttggccactccctctctgcgcgctcgctcgctcactgaggccgggcgaccaaaggtcgcccgacgcccgggctttgcccgggcggcctcagtgagcgagcgagcgcgcagagagggagtggccaactccatcactaggggttcctggaggggtggagtcgtgacgtgaattacgtcatagggttagggaggtcctgtattagaggtcacgtgagtgttttgcgacattttgcgacaccatgtggtcacgctgggtatttaagcccgagtgagcacgcagggtctccattttgaagcgggaggtttgaacgcgcagccgccatgccggggttttacgagattgtgattaaggtccccagcgaccttgacgagcatttgcccggcatttctgacagctttgtgaactgggtggccgagaaggaatgggagttgccgccagattctgacatggatctgaatctgattgagcaggcacccctgaccgtggccgagaagctgcagcgcgactttctgacggaatggcgccgtgtgagtaaggccccggaggcccttttctttgtgcaatttgagaagggagagagctacttccacatgcacgtgctcgtggaaaccaccggggtgaaatccatggttttgggacgtttcctgagtcagattcgcgaaaaactgattcagagaatttaccgcgggatcgagccgactttgccaaactggttcgcggtcacaaagacccgaaatggcgccggaggcgggaacaaggtggtggatgagtgctacatccccaattasctgctccccaaaacccagcctgagctccagtgggcgtggactaatatggaacagtatttaagcgcctgtttgaatctcgcggagcgtaaacggttggtggcgcagcatctgacgcacgtgtcgcagacgcaggagcagaacaaagagaatcagaatccaaattctgacgsrccggtgatcagatcaaaaacctcagccaggtacatggagctggtcgggtggctcgtggayaaggggattacctcggagaagcagtggatccaggaggaycaggcttcatacatctccttcaatgcggcctccaactcgcggtcccaaatcaaggctgccttggacaatgcgggaaagatcatgagcctcactaaaactgcccccgactacctggtgggccagcagcccgtggaggacatttccagcaatcggatttataaaattttggaactaaacgggtacgacccccaatacgcggcttccgtctttctgggatgggccacgaaaaagttcggcaagagaaacaccatctggctgtttgggcctgcaactaccgggaagaccaacatcgcggaggccatagcccacacggtgcccttctacgggtgcgtaaactggaccaatgagaactttcccttcaatgactgcgtcgacaagatggtgatctggtgggaggaggggaggatgaccgccaaggtcgtggagtcgaccaaagccattcttggcggaagcaaggtgcgcgtggaccagaaatgcaagtcctcggcccagatagacccgactcccgtgatcgtcacctccaacaccaacatgtgcgccgtgattgacgggaactcaacgaccttcgaacaccagcagccgttgcaagaccggatgttcaaatttgaactcacccgccgtctggatcatgactttgggaaggtcacaaagcaggaagtcaaagactttttccggtgggcaaaggatcacgtggttgaggtggagcatgaattctacgtcaaaaagggtggagccaagaaaagacccgcccccagtgacgcagatataagtgagcccaaacgggcgcgcgagtcagttgcgcagccatcgacgtcagacgcggaagcttcgatcaactacgcggacaggtaccaaaacaaatgttctcgtcacgtgggcatgaatctgatgctgtttccctgcagacaatgcgagagaatgaatcagaattcaaatatctgcttcactcacggacagaaagactgtttagagtgctttcccgtgtcagaatctcaacccgtttctgtcgtcaaaaaggcgtatcagaaactttgctacattcatcatatcatgggaaaggtgccagacgcttgcactgcctgcgatctggtcaatgtggatttggatgactgcatctctgaacaataaatgatttaaatcaggtatggctgccgatggttatcttccagattggctcgaggacactctctctgaaggaataagacagtggtggaagctyaaacctggcccaccaccaccaaagcccgcagagcggcataaggacgacagcaggggtcttgtgcttcctgggtacaagtacctcggacccttcaacggactcgacaarggagagccggtcaacgaggcagacgccgcggccctcgaacacgacaaggcctacgaccggcagctcgacagcggagacaacccgtacctcaagtacaaccacgccgacgcggagtttcaggagcgccttaaagaagatacgtcttttgggggcaacctcggacgagcagtcttccaggcgaaaaagagggttcttgaacctctgggcctggttgaggaacctgttaagacggctccgggaaaaaagaggccggtagagcattctcctgtggagccagactcctcctcgggaaccggaaaggcgggccagcagcctgcaagaaaaagattgaattttggtcagactggagacgcagactcagtacctgacccccagcctctcggacagccaccagcagccccctctggtctgggaactaatacgatggctacaggcagtggcgcaccaatggcagacaataacgagggcgccgacggagtgggtaattcctcgggaaattggcattgcgattccacatggatgggcgacagagtcatcaccaccagcacccgaacctgggccctgcccacctacaacaaccacctctacaagcaaatttccagccaatcaggagcctcaaacgacaaccactactttggctacagcaccccttgggggtattttgacttcaacagattccactgccacttttcaccacgtgactggcaaagactcatcaacaacaactggggattccgacccaaaagactcaacttcaagctctttaacattcaagtcaaagaggtcacgcagaatgacggtacgacgacgattgccaataaccttaccagcacggttcaggtgtttactgactcggagtaccagctcccgtacgtcctcggctcggcgcatcaaggatgcctcccgccgttcccagcagacgttttcatggtcccacagtatggatacctcaccctgaacaacgggagtcaggcggtaggacgctcttcmttttactgcctggagtactttccttctcagatgctgcgtactggaaacaactttcagttcagctacacctttgaagacgttcctttccacagcagctacgctcacagccagagtttggaccgtctcatgaatcctctcatcgaccagtacctgtattacttgagcagaacaaacactccaagcggaaccaccacgcagtcaaggcttcagttttctcaggccggagcgagtgacattcgggaccagtctaggaactggcttcctggaccctgttaccgccagcagcgagtatcaaagacagctgcggacaacagcaacagtgagtactcgtggactggtgctaccaagtaccacctcaatggaagagactctctggtgaatccgggcccggccatggccagccacaaggacgatgaagaaaagttttttcctcacagcggggttctcatctttgggaagcaaggctcagagaaaacaaatgtggacattgaaaaggtcatgattacagacgaagaggaaatcaggaccaccaatcccgtggctacggagcagtatggtactgtatctaccaacctccagagcggcaacacacaagcagctacctcagatgtcaacacacaaggcattcttccaggcatggtctggcaggacagagacgtgtacctgcagggacccatctgggcaaagattccacacacggacggacactttcacccttctcccctcatgggtggattcggacttaaacaccctcctccacagattctcatcaagaacaccccggtacctgcgaatccttcgaccaccttcagtgcggcaaagtttgcttccttcatcacacagtactccacgggacaggtcagcgtggagatcgagtgggagctgcagaaggaaaacagcaaacgctggaatcccgaaatccagtacacttccaactacaacaartctgttaatgtggactttactgtggacactaatggtgtgtattcagagcctcgccccattggcaccagatacctgactcgtaatctgtaattgcttgttaatcaataaaccgtttaattcgtttcagttgaactttggtctctgcgtatttctttcttatctagtttccatggctacgtagataagtagcatggcgggttaatcattaactacaaggaacccctagtgatggagttggccactccctctctgcgcgctcgctcgctcactgaggccgggcgaccaaaggtcgcccgacgcccgggctttgcccgggcggcctcagtgagcgagcgagcgcgcagagagggagtggccaa

SEQ ID NO: 63 - DNA, 4680 bp, adeno-associated virus 2
ttggccactccctctctgcgcgctcgctcgctcactgaggccgggcgaccaaaggtcgcccgacgcccgggctttgctcgcccggcctcagtgagcgagcgagcgcgcagagagggagtggccaactccatcactaggggttcctggaggggtggagtcgtgacgtgaagtacgtcatagggttagggaggtcctgtattagaggtcacgtgagtgttttgcgacattttgcgacatcatgtggtcacgcttgggtatttaagcccgagtgagcacgcagggtctccattttgaagcgggaggtttgaacgtgcagccgccatgccggggttttacgagattgtgattaaggtccccagcgaccttgacgagcatctgcccggcatttctgacagctttgtgaactgggtggccgagaaggaatgggagttgccgccagattctgacatggatctgaatctgattgagcaggcacccctgaccgtggccgagaagctgcagcgcgactttctgacggagtggcgccgtgtgagtaaggccccggaggccctcttctttgtgcaatttgagaagggagagagctacttccacatgcacgtgcttgtggagaccacaggggtgaaatccatggttttgggacgtttcctgagtcagattcgcgaaaaactgattcagagaatttaccgcgggatcgagccgactttgccaaactggttcgcggtcacaaagacccgaaatggcgccggaggcgggaacaaggtggtggatgagtgctacatccccaattacctgctccccaaaacccagcctgagcttcagtgggcgtggactaatatggaacagtatttaagcgcctgtttgaatctcgcggagcgtaaacggttggtggcgcagcatctgacgcacgtgtcgcagacgcaggagcagaacaaagagaatcagaatcccaattctgacgcgccggtgattagatcaaaaacctcagccaggtacatggagctggtcgggtggctcgtggataaggggattacgtcggagaagcagtggatccaggaggaccaggcttcatacatctccttcaatgcggcctccaactcgcggtcccaaatcaaggctgctctggacaatgcgggaaagatcatgagcctcactaaaaccgccccmgactacctrgtgggccagcagcccgtggaggacatttccagcaatcggatttataaaatcttggaactgaacgggtacgatccccaatacgcggcttccgtctttctgggatgggccacgaaaaagttcggcaagaggaacaccatctggctgtttgggcctgcaactaccgggaagaccaacatcgcggaggccatagcccacactgtgcccttctacgggtgcgtaaactggaccaatgagaactttcccttcaacgactgtgtcgacaagatggtgatctggtgggaggagggaaagatgaccgccaaggtcgtggagtcggccaaagccattctcggcggaagcaaggtgcgcgtggaccagaaatgcaagtcctcggcccagatagacccgactcccgtgatcgtcacctccaacaccaacatgtgcgccgtgattgacgggaactcaacgaccttcgaacaccagcagccgttgcaagaccggatgttcaaatttgaactcacccgccgtctggatcatgactttgggaaggtcaccaagcaggaagtcaaagactttttccggtgggcaaaggatcacgtggttgaggtggagcatgaattctacgtcaaaaagggtggagccaagaaaagrcccgcccccagtgacgcagatataagtgagcccaaacgggcgcgcgagtcagttgcgcagccatcgacgtcagacgcggaagcttcgatcaactacgcggacaggtaccaaaacaaatgttctcgtcacgtgggcatgaatctgatgctgtttccctgcagacaatgcgagagaatgaatcagaattcaaatatctgcttcactcacggacagaaagactgtttagagtgctttcccgtgtcagaatctcaacccgtttctgtcgtcaaaaaggcgtatcagaaactttgctacattcatcatatcatgggaaaggtgccagacgcttgcactgcctgcgatctggtcaatgtggatttggatgactgcatctctgaacaataaatgatttaaatcaggtatggctgccgatggttatcttccagattggctcgaggacactctctctgaaggaataagacagtggtggaagctcaaacctggcccaccaccaccaaagcccgcagagcggcatcaggacgacagcaggggtcttgtgcttcctgggtacaagtacctcggacccttcaacggactcgacaaaggagagccggtcaacgaggcagacgccgcggccctcgagcacgacaaggcctacgaccggcagctcgaaagcggagacaacccgtacctcaagtacaaccacgccgacgcggagtttcaggagcgccttaaagaagatacgtcttttgggggcaacctcggacgagcagtcttccaggcgaaaaagagggttcttgaacctctgggcctggttgaggaacctgttaagacggctccgggaaaaaagaggccggtagagcactctcctgtggagccagactcctcctcgggaaccggaaaggcgggcaaccagcctgcaagaaagagattgaatttcggtcagactggagacgcagactccgtacctgacccccaacctctcggacagccaccagcagccccctctggtctgggaactaatacgatggctacaggcagtggcgcaccaatggcagacaataacgagggcgccgacggagtgggtaattcctcgggaaattggcattgcgattccacatggctgggcgacagagtcatcaccaccagcacccgcacctgggctctgcccacctacaacaaccacctctacaagcaaatctccagccaatcaggagcctcgaacgacaatcactactttggctacagcaccccctgggggtattttgacttcaacagattccactgccacttttcaccacgtgactggcaaagactcatcaacaacaattggggattccggcccaaaagactcaacttcaagctgtttaacattcaagtcaaagaggtcacgcagaatgacggtacgacgacgattgccaataaccttaccagcacggttcaggtgtttactgactcggagtaccagctcccgtacgtcctcggctcggcgcatcaaggatgcctcccgccgttcccagcagacgtcttcatggtgccacagtatggatacctcaccctgaacaacgggagtcaggcggtcggacgctcttccttttactgcctggagtactttccttctcaaatgcttcgtaccggaaacaactttaccttcagctacacctttgaagacgttcctttccacagcagctacgctcacagtcaaagtctggaccgtctcatgaatcctctcatcgaccagtacctgtattacttgagcggaacaaacactccaagcggaaccaccacgcagtccaggcttcagttttctcaggccggagcaagtgacattcgggaccagtctaggaactggcttcctggaccctgttaccgccagcagcgagtatcaaagacagctgcggacaacagcaacagtgagtactcgtggactggagctaccaagtaccacctcaatggaagagactctctggtgaatccgggcccggccatggccagccacaaggacgatgaagaaaagttttttcctcagagcggggttctcatctttgggaagcaaggctcagagaaaacaaatgtggacattgaaaaggtcatgattacagacgaagaggaaatcaggaccaccaatcccgtggctacggagcagtatggttctgtatctaccaacctccagagcggcaacacacaagcagctacctcagatgtcaacacacaaggcgttcttccaggcatggtctggcaggacagagacgtgtacctgcaggggcctatctgggcaaagattccacacacggacggacattttcacccctctcccctcatgggtggattcggacttaaacaccctcctccacagattctcatcaaaaacaccccggtacctgcgaatccttcgaccaccttcagtgcggcaaagtttgcttccttcatcacacagtactccacgggacaggtcagcgtggagatcgagtgggagctgcagaaggaaaacagcaaacgctggaaccccgagatccagtacacttccaactacaacaaatctgttaatgtggactttactgtggacactaatggtgtgtattcagagcctcgccccattggcaccagatacctgactcttaatctgtaattgcttgttaatcaataaaccgtttaattcgtttcagttgaactttggtctctgcgtacttctttcttatctagtttccatggctacgtagataagtagcatggcgggttaatcattaactacaaggaacccctagtgatggagttggccactccctctctgcgcgctcgctcgctcactgaggccgggcgaccaaaggtcgcccgacgcccgggctttgcccgggcggcctcagtgagcgagcgagcgcgcagagagggagtggccaa

SEQ ID NO: 64 - DNA, 4680 bp, adeno-associated virus 2
ttggccactccctctctgcgcgctcgctcgctcactgaggccgggcgaccaaaggtcgaccgacgcccgggctttggtcgcccggcctcagtgagcgagcgagcgcgcagagagggagtggccaactccatcactaggggttcctggaggggtggagtcgtgacgtgaattacgtcatagggttagggaggtcctgtattagaggtcacgtgagtgttttgcgacattttgcgacaccatgtggtcacgctgggtatttaagcccgagtgagcacgcagggtctccattttgaagcgggaggtttgaacgcgcagccgccatgccggggttttacgagattgtgattaaggtccccagcgaccttgacgagcatctgccgggcatttctgacagctttgtgaactgggtggccgagaaggaatgggagttgccgccagattctgacatggatctgaatctgattgagcaggcacccctgaccgtggccgagaagctgcagcgcgactttctgacggagtggcgccgtgtgagtaaggccccggaggccctcttctttgtgcaatttgagaagggagagagctacttccacatgcacgtgctggtggagaccactggggttaaatccatggttttgggacgtttcctgagtcagattcgcgaaaaactgattcagagaatttaccgcgggatcgagccgactttgccaaactggttcgcggtcacaaagacccgaaatggcgccggaggcgggaacaaggtggtggatgagtgctacatccccaattacctgctccccaaaacccagcctgagctccagtgggcgtggactaatatggaacagtatttaagcgcctgtttgaatctcgcggagcgtaaacggttggtggcgcagcatctgacgcacgtgtcgcagacgcaggagcagaacaaagagaatcagaatcccaattctgacgcgccggtgattagatcaaaaacctcagccaggtacatggagctggtcgggtggctcgtggataaggggattacctcggagaagcagtggatccaggaggaccaggcctcatacatctccttcaatgcggcctccaactcgcggtcccagataaaggctgctctggacaatgcgggaaagatcatgagcctgactaaaacggcccccgactacctggtgggccagcagcccgtggaggacatttccagcaatcggatttataaaatcttggaactgaacgggtacgatccccaatatgcggcttccgtctttctgggatgggccacgaaaaagttcggcaagaggaacaccatctggctgtttgggcctgcaactaccgggaagaccaacatcgcggaggccatagcccacactgtgcccttctacgggtgcgtaaactggaccaatgagaactttcctttcaacgactgtgtcgacaagatggtgatctggtgggaggagggaaagatgaccgccaaggtcgtggagtcggccaaagccattctcggaggaagcaaggtgcgcgtggaccagaaatgcaaatcctcggcccagatagacccgactcccgtgatcgtcacctccaacaccaacatgtgcgccgtgattgacgggaactcaacgaccttcgaacaccagcagccgttgcaagaccggatgttcaaatttgaactcacccgccgtctggatcatgactttgggaaggtcaccaagcaggaagtcaaagactttttccggtgggcaaaggatcacgtggttgaggtggagcatgaattctacgtcaaaaagggtggagctaaaaaaagacccgcccccagtgacgcagatataagtgagcccaaacgggcgcgcgagtcagttgcgcagccatcgacgtcagacgcggaagcttcgatcaactacgcggacaggtaccaaaacaaatgttctcgtcacgtgggcatgaatctgatgctgtttccctgcagacaatgcgagagaatgaatcaaaattcaaatatctgcttcactcacggacagaaagactgtttagagtgctttcccgtgtcagaatctcaacccgtttctgtcgtcaaaaaggcgtatcagaaactttgctacattcatcatatcatgggaaaggtgccagacgcttgcactgcctgcgatctggtcaatgtggatttggatgactgcatctctgaacaataaatgatttaaatcaggtatggctgccgatggttatcttccagattggctcgaggacactctctctgaaggaataagacagtggtggaagctcaaacctggcccaccaccaccaaagcccgcagagcggcataaggacgacagcaggggtcttgtgcttcctgggtacaagtacctcggacccttcaacggactcgacaagggagagccggtcaacgaggcagacgccgcggccctcgagcacgacaaggcctacgaccggcagctcgacagcggagacaacccgtacctcaagtacaaccacgccgacgcggagtttcaggagcgccttaaagaagatacgtcttttgggggcaacctcggacgagcagtcttccaggcgaaaaagagggttcttgaacctctgggcctggttgaggaacctgttaagacggctccgggaaaaaagaggccggtagagcactctcctgtggagccagactcctcctcgggaaccggaaaagcgggccagcagcctgcaagaaaaagattgaattttggtcagactggagacgcagactccgtacctgacccccagcctctcggacagccaccagcagccccctctggtctgggaactaatacgatggctacaggcagtggcgcaccaatggcagacaataacgagggcgccgacggagtgggtaattcctcgggaaattggcattgcgattccacatggatgggcgacagagtcatcaccaccagcacccgcacctgggctctgcccacctacaacaaccatctgtacaaacagatttccagccaatcaggagccagcaacgacaaccactactttggctacagcaccccctgggggtattttgacttcaacagattccactgccacttttcaccacgtgactggcaaagactcatcaacaacaactggggattccgacccaagagactcaacttcaagctatttaacattcaagtcaaagaggtcacgcagaatgacggtacgacgacgattgccaataaccttaccagcacggttcaggtgtttactgactcggagtaccagctcccgtacgtcctcggctcggcgcatcaaggatgcctcccgccgttcccagcagacgtcttcatggtgccacagtatggatacctcaccctgaacaacgggagtcaggcagtaggacgctcttccttttactgcctggagtactttccttctcagatgctgcgtaccggaaacaactttaccttcagctacacctttgaggacgttcctttccacagcagctacgctcacagccagagtttggaccgtctcatgaatcctctcatcgaccagtacctgtattacttgagcagaacaaacactccaagcggaaccaccacgcagtccaggcttcagttttctcaggccggagcgagtgacattcgggaccagtctaggaactggcttcctggaccctgttaccgccagcaacgagtatcaaagacatctgcggataacaacaacagtgaatattcgtggactggagctaccaaataccacctcaatggcagagactctctggtgaatccgggcccggccatggccagccacaaggacgatgaagaaaagttttttcctcaaagcggggttctcatctttggaaaacaaggctcagagaaaacaaatgtggacattgaaaaggtcatgattacagacgaagaggaaatcaggaccaccaatcccgtggctacagagcagtatggttctgtatctaccaacctccagagcggcaacacacaagcagctaccgcagatgtcaacacacaaggcgttcttcctggcatggtctggcaggacagagacgtgtacctgcaggggcccatctgggcaaagattccacacacggacggacattttcacccctctcccctcatgggcggattcggacttaaacaccctcctccacagattctcatcaagaacaccccggtacctgcgaatccttcgaccaccttcagtgcggcaaagtttgcttccttcattacacagtactccacggggcaggtcagcgtggagatcgaatgggagctgcagaaagagaacagcaaacgctggaatcccgagattcagtacacttccaactacaacaaatctgttaatgtggactttactgtggacactaatggtgtgtattcagagcctcgccccattggcaccagatacctgactcgtaatctgtaattgcttgttaatcaataaaccgtttaattcgtttcagttgaactttggtctctgcgtacttcttttattatctagtttccatggctacgtagataagtagcatggcgggttaatcattaactctaaggaacccctagtgatggagttggccactccctctctgcgcgctcgctcgctcactgaggccgggcgaccaaaggtcgcccgacgcccgggctttgcccgggcggcctcagtgagcgagcgagcgcgcagagagggagtggccaa

SEQ ID NO: 65 - DNA, 4679 bp, adeno-associated virus 2
ttggccactccctctctgcgcgctcgctcgctcactgaggccgggcgaccaaaggtcgcccgacgcccgggctttgcccgggcggcctcagtgagcgagcgagcgcgcagagagggagtggccaactccatcactaggggttcctggaggggtggagtcgtgacgtgaagtacgtcatagggttagggaggtcctgtattagaggtcacgtgagtgttttgcgacattttgcgacaccatgtggtcacgctgggtatttaagcccgagtgagcacgcagggtctccattttgaagcgggaggtttgaacgcgcagccgccatgccgggattttacgagattgtgattaaggtccccagcgaccttgacgagcatctgcccggcatttctgacagctttgtgaactgggtggccgagaaggaatgggagttgccgccagattctgacatggatctgaatctgattgagcaggcacccctgaccgtggccgagaagctgcagcgcgactttctgacggaatggcgccgtgtgagtaaggccccggaggccctcttctttgtgcaatttgagaagggagagagctacttccacatgcacgtgctcgtggagactaccggggtgaaatccatggttttgggacgtttcctgagtcagattcgcgaaaaactgattcagagaatttaccgcgggatcgagccgactttgccaaactggttcgcggtcacaaagacccgaaatggcgccggaggcgggaacaaggtggtggatgagtgctacatccccaattacctgctccccaaaacccagcctgagctccagtgggcgtggactaatatggaacagtatttaagcgcctgtttgaatctcgcggagcgtaaacggttggtggcgcagcatttgacgcacgtgtcgcagacgcaggagcagaacaaagagaatcagaatcccaattctgacgcgccggtgattagatcaaaaacctcagccaggtacatggagctggtcgggtggctcgtggataaggggattacgtcggagaagcagtggatccaggaggaccaggcctcatacatctccttcaatgcggcctccaactcgcggtcccaaatcaaggctgctctggacaatgcgggaaagatcatgagcctcactaaaaccgcccccgactacctggtgggccagcagcccgtggaggacatttccagcaatcggatttataaaatcttggaactgaacgggtacgatccccaatatgcggcttccgtctttctgggatgggccacaaaaaagttcggcaagaggaacaccatctggctgtttgggcctgcaactaccgggaagaccaacatcgcggaggccatagcccacactgtgcccttctacgggtgcgtaaactggaccaatgagaactttcctttcaacgactgtgtcgacaagatggtgatctggtgggaggagggaaagatgaccgccaaggttgtggagtcggccaaagccattctcggaggaagcaaggtgcgcgtggaccagaaatgcaagtcctcggcccagatagacccgactcccgtgatcgtcacctccaacaccaacatgtgcgccgtgattgacgggaactcaacgaccttcgaacaccagcagccgttgcaagaccggatgttcaaatttgaactcacccgccgtctggatcatgactttgggaaggtcaccaagcaggaagtcaaagactttttccggtgggcaaaggatcacgtggttgaggtggagcatgaattctacgtcaaaaagggtggagccaagaaaagacccgcccccagtgacgcagatataagtgagcccaaacgggcgcgcgagtcagttgcgcagccatcgacgtcagacgcggaagcttcgatcaactacgcggacaggtaccaaaacaaatgttctcgtcacgtgggcatgaatctgatgctgtttccctgcagacaatgcgagagaatgaatcagaattcaaatatctgcttcactcacggacagaaagactgtttagagtgctttcccgtgtcagaatctcaacccgtttctgtcgtcaaaaaggcgtatcagaaactgtgctacattcatcatatcatgggaaaggtgccagacgcttgcactgcctgcgatctggtcaatgtggatttggatgactgcatctctgaacaataaatgatttaaatcaggtatggctgccgatggttatcttccagattggctcgaggacactctctctgaaggaataagacagtggtggaagctcaaacctggcccaccaccaccaaagcccgcagagcggcataaggacgacagcaggggtcttgtgcttcctgggtacaagtacctcggacccttcaacggactcgacaagggagagccggtcaacgaggcagacgccgcggccctcgagcacgacaaggcctacgaccggcagctcgacagcggagacaacccgtacctcaagtacaaccacgccgacgcggagtttcaggagcgccttaaagaagatacgtcttttgggggcaacctcggacgagcagtcttccaggcgaaaaagagggttcttgaacctctgggcctggttgaggaacctgttaagacggctccgggaaaaaagaggccggtagagcactctcctgtggagccagactcctcttcgggaaccggaaaagcgggccagcagcctgcaagaaaaagactgaatttcggtcagactggagacgcagactccgtacctgacccccagcctctcggacagccaccagcagccccctctggtctgggaactaatacgatggcttcaggcagtggcgcaccaatggcagacaataacgagggcgccgacggagtgggtaattcctcgggaaattggcattgcgattccacatggatgggcgacagagtcatcaccaccagcacccgaacctgggccctgcccacctacaacaaccatctctacaagcagatttccagccaatcaggagcttcaaacgacaaccactactttggctacagcaccccctgggggtattttgacttcaacagattccactgccacttctcgccacgtgactggcagagactcatcaacaacaactggggattccgtcccaagagactcaacttcaagctgtttaacattcaagtcaaagaggtcacgcagaatgacggtacgacgacgattgccaataaccttaccagcacggttcaggtgtttactgactcggagtaccagctcccgtacgtcctcggttcggcgcatcaaggatgcctcccgccgttcccagcagacgtcttcatggtgccacagtatggatacctcaccctgaacaacgggagtcaggcggtaggacgctcttcattttactgcctggagtactttccttctcagatgctgcgtaccggaaacaactttaccttcagctacacctttgaggacgttcctttccacagcagctacgctcacagccagagtttggaccgtctcatgaatcctctcatcgaccagtacctgtattacttgagcagaacaaacactccaagcggaaccactacgcagtccaggcttcagttttctcaggccggagcgagtgacattcgggaccagtctaggaactggcttcctggaccctgttaccgccagcagcgagtatcaaaaacatctgcggataacaacaacagtgaatactcgtggactggagctaccaagtaccacctcaatggcagagactctctggtgaatccgggcccggccatggccagccacaaggacgatgaagaaaagttttttcctcagagcggggttctcatctttggaaaacaagactcaggaaaaactaatgtggacattgaaaaggtcatgattacagacgaagaggaaatcaggaccaccaatcccgtggctacggagcagtatggtgctgtatctaccaacctccagagcggcaacacacaagcagctacctcagatgtcaacgcacaaggtgttcttccaggcatggtctggcaggacagagaygtgtacctgcaggggcccatctgggcaaagattccwcacacggayggacaytttcacccctctcccctcatgggcggattcggactgaaacaccctcctccacaaattctcatcaagaacaccccggtacctgcgaatccttcaaccaccttcagtgcggcaaagtttgcttccttcatyacacagtactccacggggcaggtcagcgtggagatcgagtgggagctgcagaaggaaaacagcaaacgctggaatcccgaaattcagtacacttccaactacaacaaatctgttaatgtggactttactgtggacactaatggcgtgtattcagagcctcgccccattggcaccagatacctgactcgtaatctgtaattgcttgttaatcaataaaccgtgtaattcgtttcagttgaactttggtctctgcgtacttatttcttatctagtttccatggctacgtagataagtagcatggcgggttaatcattaactctaaggaacccctagtgatggagttggccactccctctctgcgcgctcgctcgctcactgaggccgcccgggcaaaggtcgcccgacgcccgggcgtcgggcgaccggcctcagtgagcgagcgagcgcgcagagagggagtggccaa

SEQ ID NO: 66 - DNA, 4679 bp, adeno-associated virus 2
ttggccactccctctctgcgcgcgcgctcgctcactgaggccgggcgaccaaaggtcgcccgacgcccgggctttgcccgggcggcctcagtgagcgagcgagcgcgcagagagggagtggccaactccatcactaggggttcctggatgggtggagtcgtgacgtaaagtacgtcatagggttagggaggtcctgtattagaggtcacgtgagtgttttgcgacattttgcgacaccatgtggttacgctgggtatttaagcccgagtgagcacgcagggtctccattttgaagcgggaggtttgaacgcgcagtcgccatgccggggttttacgagattgtgattaaggtccccagcgaccttgacgagcatttgcccggcatttctgacagctttgtgaactgggtggccgagaaggaatgggagttgccgccagattctgacatggatctgaatctgattgagcaggcacccctgaccgtggccgagaagctgcagcgcgactttctgacggaatggcgccgtgtgagtaaggccccggaggccctcttctttgtgcaatttgagaagggagaaagctacttccacatgcacgtgctggtggagaccaccggggtgaaatcaatggttttgggacgtttcctgagtcagattcgcgaaaaactgattcagagaatttaccgcgggatcgagccgactttgccaaactggttcgcggtcacaaagacccgaaatggcgccggaggcgggaacaaggtggtggatgagtgctacatccccaattacctgctccccaaaacccagcctgagctccagtgggcgtggactaatatggaacagtatttaagcgcctgtttgaatctcgcggagcgtaaacggttggtggcgcagcatctgacgcacgtgtcgcagacgcaggagcagaacaaagagaatcagaatcccaattctgacgcgccggtgattagatcaaaaacctcagccaggtacatggagctggtcgggtggctcgtggacaaggggattacctcggagaagcagtggatccaggaggaccaggcttcatacatctccttcaatgcggcctccaactcgcggtcccagatcaaggctgctctggacaatgcgggaaagatcatgagcctgactaaaacggcccccgactacctggtgggccagcagcccgtggaggacatttccagcaatcggatttataaaatcttggaactgaacgggtacgatccccaatacgcggcttccgtctttctgggatgggccacgaaaaagttcggcaagaggaacaccatctggctgtttgggcctgcaactaccggaaagaccaacatcgcggaggccatagcccacactgtgcccttctacgggtgcgtaaactggaccaatgagaactttcccttcaacgactgtgtcgacaagatggtgatctggtgggaggaggggaagatgaccgccaaggttgtggagtcggccaaagccattctcggaggaagcaaggtgcgcgtggaccagaaatgcaagtcctcggcccagatagacccgactcccgtgatcgtcacctccaacacaaacatgtgcgccgtgattgacgggaactcaacgaccttcgaacaccagcagccgttgcaagaccggatgttcaaatttgaactcacccgccgtctggatcatgactttgggaaggtcaccaagcaggaagtcaaagactttttccggtgggcaaaggatcacgtggttgaggtggagcatgaattctacgtcaaaaagggtggagccaagaaaagacccgcccccagtgacgcagatataagtgagcccaaacgggcgcgcgagtcagttgcgcagccatcgacgtcagacgcggaagcttcgatcaactacgcggacaggtaccaaaacaaatgttctcgtcacgtgggcatgaatctgatgctgtttccctgcagacaatgcgagagaatgaatcagaattcaaatatctgcttcactcacggacagaaagactgtttagagtgctttcccgtgtcagaatctcaacccgtttctgtcgtcaaaaaggcgtatcagaaactttgctacattcatcatatcatgggaaaggtaccagacgcttgcactgcctgcgatctggtcaatgtggatttggatgactgcatctctgaacaataaatgatttaaatcaggtatggctgccgatggttatcttccagattggctcgaggacactctctctgaaggaataagacagtggtggaagctcaaacctggcccaccaccaccaaagcccgcagagcggcataaggacgacagcaggggtcttgtgcttcctgggtacaagtacctcggacccttcaacggactcgacaagggggagccggtcaacgaggcagacgccgcggccctcgagcacgacaaggcctacgaccggcagctcgacagcggagacaacccgtacctcaagtacaaccacgccgacgcggagtttcaggagcgccttaaagaagatacgtcttttgggggcaacctcggacgagcagtcttccaggcgaaaaagagggttcttgaacctctgggcctggttgaggaacctgttaagacggctccgggaaaaaagaggccggtagagcactctcctgcggagccagactcctcctcgggaaccggaaaagcgggccagcagcctgcaagaaaaagattgaatttcggtcagactggagacgcagactccgtacctgacccccagcctctcggacagccaccagcagccccctctggtctgggaactaatacgatggctacaggcagtggcgcaccaatggcagacaataacgagggcgccgacggagtgggtaattcctcgggaaattggcattgcgattccacatggatgggcgacagagtcatcaccaccagcacccgcacctgggctctgcccacctacaacaaccatctgtacaagcagatttccagccaatcaggagccagcaacgacaaccactactttggctacagcaccccctgggggtattttgacttcaacagattccactgccacttttcaccacgtgactggcaaagactcatcaacaacaactggggattccggccaaaaagactcaacttcaagctctttaacattcaagtcaaggaggtcacgcagaatgacggtacgacgacgattgccaataaccttaccagcacggttcaggtgtttactgactcggagtaccagctcccgtacgtcctgggctcggcgcatcaaggatgcctcccgccgttcccagcagacgtcttcatggtgccacagtatggatacctcaccctgaacaacgggagtcaggcggtaggacgctcttccttttactgcctggagtactttccttctcagatgcttcgtaccggaaacaactttaccttcagctacacctttgaagacgttcctttccacagcagctacgctcacagtcaaagtctggaccgtctcatgaatcctctcatcgaccagtacctgtattacttgagcagaacaaacactccaagcggaaccaccacgcagtccaggcttcagttttctcaggccggagcgagtgacattcgggaccagtctaggaactggcttcctggaccctgttaccgccagcagcgagtatcaaagacagctgcggataacaacaacagtgaatactcgtggactggagctaccaagtaccacctcaatggcagagactctctggtgaatccgggcccggccatggccagccacaaggacgatgaagaaaagttttttcctcagagcggggttctcatctttggaaaacaagactcaggaaaaactaatgtggacattgaaaaggtcatgattacagacgaagaggaaatcaggaccaccaatcccgtggctacggagcagtatggtgctgtatctaccaacctccagagcggcaacacacaagcagctacctcagatgtcaacgcacaaggcgttcttccaggcatggtctggcaggacagagacgtgtacctgcaggggcccatctgggcaaagattccacacacggacggacattttcacccctctcccctcatgggtggattcggacttaaacaccctcccccgcagattctcatcaagaacaccccggtacctgcgaatccttcgaccaccttcagtgcggcaaagtttgcttcctttatcacacagtactccacggggcaggtcagcgtggagatcgagtgggagctgcagaaggagaacagcaaacgctggaatcccgagattcagtacacttccaactacaacaaatctgttaatgtggactttactgtggacactaatggcgtgtattcagagcctcgccccattggcaccagatacctgactcgtaatctgtaattgcttgttaatcaataaaccgtttaattcgtttcagttgaactttggtctctgcgtacttatttcttatctagtttccatggctacgtagataagtagcatggcgggttaatcattaactctaaggaacccctagtgatggagttggccactccctctctgcgcgctcgctcgctcactgaggccgcccgggcaaagcccgggcgacgcccgggctttgcccgggcggcctcagtgagcgagcgagcgcgcagagagggagtggccaa

SEQ ID NO: 67 - DNA, 4670 bp, adeno-associated virus 2
ttggccactccctctctgcgcgctcgctcgctcactgaggccgggcgaccaaaggtcgcccgacgcccgggctttgcccgggcggcctcagtgagcgagcgagcgcgcagagagggagtggccaactccatcactaggggttcctggaggggtggagtcgtgacgtgaagtacgtcatagggttagggaggtcctgtattagaggtcacgtgagtgttttgcgacattttgcgacaccatgtggtcacgctgggtatttaagcccgagtgagcacgcagggtctccattttgaagcgggaggtttgaacgcgcagccgccatgccggggttttacgagattgtgattaaggtccccagcgaccttgacgagcatctgcccggcatttctgacagctttgtgaactgggtggccgagaaggaatgggagttgccgccagattctgacatggatctgaatctgattgagcaggcacccctgaccgtggccgagaagctgcagcgcgactttctgacggagtggcgccgcgtgagtaaggccccggaggccctcttctttgtgcaatttgagaagggagagagctacttccacatgcacgtgctggtggagaccaccggggtgaaatccatggttttgggacgtttcctgagtcagattcgcgaaaaactgattcagagaatttaccgcgggatcgagccgactttgccaaactggttcgcggtcacaaagacccgaaatggcgccggaggcgggaacaaggtggtggatgagtgctacatccccaattacctgctccccaaaacccagcctgagctccagtgggcgtggactaatatggaacagtatttaagcgcctgtttgaatctcgcggagcgtaaacggttggtggcgcagcatctgacgcacgtgtcgcagacgcaggagcagaacaaagagaatcagaatccaaattctgacgcgccggtgattagatcaaaaacctcagccaggtatatggagctggtcgggtggctcgtggataaggggattacctcggagaagcagtggatccaggaggatcaggcttcatacatctccttcaatgcggcctctaactcgcgatcccagatcaaggctgctctggacaatgcgggaaagatcatgagcctgactaaaaccgcccccgactacctggtgggccagcatcccgtggaggacatttccagcaatcggatttataaaatcttggaactgaacgggtacgatccccaatacgcggcttccgtctttctgggatgggccacgaaaaagttcggcaagaggaacaccatctggctgtttgggcctgcaactaccgggaagaccaacatcgcggaggccatagcccacacggtgcccttctacgggtgcgtaaactggaccaatgagaactttccattcaacgactgtgtcgacaagatggtgatctggtgggaggaggggaagatgaccgccaaggtcgtggagtcggccaaagccattctcggaggaagcaaggtgcgcgtggaccagaaatgcaagtcctcggcccagatagacccgactcccgtgatcgtcacctccaacaccaacatgtgcgccgtgattgacgggaactcaacgaccttcgagcaccagcagccgttgcaagaccggatgttcaaatttgaactcacccgccgtctggatcatgactttgggaaggtcaccaagcaggaagtcaaagactttttccggtgggcaaaggatcacgtggttgaggtggagcatgaattctacgtcaaaaagggtggagccaaaaaaagacccgcccccagtgacgcagatataagtgagcccaaacgggtgcgcgagtcagttgcgcagccatcgacgtcagacgcggaagcttcaatcaactacgcggacaggtaccaaaacaaatgttctcgtcacgtgggcatgaatctgatgctgtttccctgcagacaatgcgagagaatgaatcagaattcaaatatttgcttcactcacggacagaaagactgtttagagtgctttcccgtgtcagaatctcaacccgtttctgtcgtcaaaaaggcgtatcagaaactgtgctacattcatcatatcatgggaaaggtgccagacgcttgcactgcctgcgatctggtcaatgtggatttggatgactgcatctctgaacaataaatgatttaaatcaggtatggctgccgatggttatcttccagattggctcgaggacactctctctgaaggaataagacagtggtggaagctcaaacctggcccaccaccaccaaagcccgcagagcggcatcaggacgacagcaggggtcttgtgcttcctgggtacaagtacctcggacccttcaacggactcgacaagggagagccggtcaacgaggcagacgccgcggccctcgagcacgacaaggcctacgaccggcagctcgacagcggagacaacccgtacctcaagtacaaccacgccgacgcggagtttcaggatcgccttaaagaagatacgtcttttgggggcaacctcggacgagcagtcttccaggcgaaaaagagggttcttgaacctctgggcctggttgaggaacctgttaaaacggctccgggaaaaaagaggccggtagagcactctcctgtggagccagactcctcctcgggaaccggaaaagcgggccagcagcctgcaagaaagagattgcagactggagacgcagactccgtacctgacccccagcctctcggacagccaccagcagccccctctggtctgggaactaatacgatggctacaggcagtggcgcaccaatggcagacaataacgagggcgccgacggagtgggtaattcctcgggaaattggcattgcgattccacatggatgggcgacagagtcatcaccaccagcacccgcacctgggctctgcccacctacaacaaccatctgtacaagcagatatccagccagtctggagccagcaacgacaaccactactttggctacagcaccccctgggggtattttgacttcaacagattccactgccacttttcaccacgtgactggcaaagactcatcaacaacaactggggattccggccaaaaagactcaacttcaagctctttaacattcaagtcaaggaggtcacgcagaatgacggtacgacaacgattgccaataaccttaccagcacggttcaggtgtttactgactcggagtaccagctcccgtacgtcctcggctcggcgcatcaaggatgcctcccgccgttcccagcagacgtcttcatggtgccacagtatggatacctcaccctgaacaacgggagtcaggcagtaggacgctcttcattttactgcctggagtactttccttctcagatgcttcgtaccggaaacaactttaccttcagctacacttttgaggacgttcctttccacagcagctacgctcacagccagagtttggaccgtctcatgaatcctctcatcgaccagtacctgtattacttgagcagaacaaacactccaagcggaaccactacgcagtccaggcttcagttttctcaggccggagcgagtgacattcgggaccagtctaggaactggcttcctggaccctgttaccgccagcagcgagtatcaaagacagctgcggacaacaacaacagtgaatactcgtggactggagctaccaagtaccacctcaatggcagagactctctggtgaatccgggcccggccatggccagccacaaggacgatgaagaaaagttttttcctcagagcggggttctcatctttggaaaacaagactcgggaaaaactaatgtggacattgaaaaggtcatgattacagacgaagaggaaatcaggaccaccaatcccgtggctacggagcagtatggtgctgtatctaccaacctccagagcggcaacacacaagcagctacctcagatgtcaacgcacaaggtgttcttccaggcatggtctggcaggacagagacgtgtacctgcaggggcccatctgggcaaagattccacacacggacggacattttcacccctctcccctcatgggcggattcggacttaaacaccctcctccacaaattctcatcaagaacacccctgtacctgcgaatccttcgaccaccttcagtgcggcaaagtttgcttccttcattacacagtactccacggggcaggtcagcgtggagatcgagtgggagctgcagaaagagaacagcaaacgctggaatcccgagattcagtacacttccaactacaacaaatctgttaatgtggactttactgtagacactaatggtgtgtattcagagcctcgccccattggcaccagatacctgactcgtaatctgtaattgcttgttaatcaataaaccgtttaattcgtttcagttgaactttggtctctgcgtacttatttcttatctggtttccatggctacgtagataagtagcatggcgggttaatcattaaatctaaggaacccctagtgatggagttggccactccctctctgcgcgctcgctcgctcactgaggccgggcgaccaaaggtcgcccgacgcccgggctttgcccgggcggcctcagtgagcgagcgagcgcgcagagagggagtggccaa

SEQ ID NO: 68 - DNA, 4679 bp, adeno-associated virus 2
ttggccactccctctctgcgcgctcgctcgctcactgaggccgggcgaccaaaggtcgcccgacgcccgggctttgcccgggcggcctcagtgagcgagcgagcgcgcagagagggagtggccaactccatcactaggggttcctggaggggtggagtcgtgacgtgaagtacgtcatagggttagggaggtcctgtattagaggtcacgtgagtgttttgcgacattttgcgacgccatgtggtcacgctgggtatttaagcccgagtgagcacgcagggtctccattttgaagcgggaggtttgaacgcgcagccgccatgccggggttttacgagattgtgattaaggtccccagcgaccttgacgagcatttgcccggcatttctgacagctttgtgaactgggtggccgagaaggaatgggagttgccgccagattctgacatggatctgaatctgattgagcaggcacccctgaccgtggccgagaagctgcagcgcgactttctgacggagtggcgccgcgtgagtaaggccccggaggccctcttctttgtgcaatttgagaagggagagagctacttccacatgcacgtgctcgtggaaaccaccggggtgaaatccatggttttgggacgtttcctgagtcagattcgcgaaaaactgattcagagaatttaccgcgggatcgagccgactttgccaaactggttcgcggtcacaaagaccagaaatggcgccggaggcgggaacaaggtggtggatgagtgctacatccccaattacctgctccccaaaacccaacctgagctccagtgggcgtggactaatatggaacagtatttaagcgcctgtttgaatctcgcggagcgtaaacggttggtggcgcagcatctgacgcacgtgtcgcagacgcaggagcagaacaaagagaatcagaatcccaattctgacgcgccggtgattagatcaaaaacctcagccaggtacatggagctggtcgggtggctcgtggataaggggattacgtcggagaagcagtggatccaggaggatcaggcttcatacatctccttcaatgcggcctccaactcgcggtctcaaatcaaggctgccttggacaatgcgggaaagattatgagcctgactaaaaccgcccccgactacctggtgggccagcagcccgtggaggacattttcagcaatcggatttataaaatcttggaactgaacgggtacgatccccaatacgctgcttccgtctttctgggatgggccacaaaaaagttcggcaagaggaacaccatctggctgtttgggcctgcaactaccgggaagaccaacatcgcggaggccatagcccacactgtacccttctacgggtgtgtaaactggaccaatgagaactttcccttcaacgactgcgtcgacaagatggtgatctggtgggaggaggggaagatgaccgccaaggtcgtggagtcggccaaagccattctcggcggaagcaaggtgcgcgtggaccaaaaatgcaagtcctcggcccagatcgacccgactcccgtgatcgtcacttccaacaccaacatgtgcgccgtgattgacgggaactcaacgaccttcgaacaccagcagccgttgcaagaccggatgttcaaatttgaactcacccgccgtctggatcatgactttgggaaggtcaccaagcaggaagtcaaagactttttccggtgggcaaaggatcacgtggttgaggtggagcatgaattttacgtcaaaaagggtggagccaaaaaaagacccgcccccagtgacgcagatataagtgagcccaaacgggcgcgcgagtcagttgcgcagccatcgacgtcagacgcggaagcttcgatcaactacgcggacaggtaccaaaacaaatgttctcgtcacgtgggcatgaatctgatgctgtttccctgcagacaatgcgagagaatgaatcagaattcaaatatctgcttcactcacggacagaaagactgtttagagtgctttcccgtgtcagaatctcaacccgtttctgtcgtcaaaaaggcgtatcagaaactttgctacattcatcatatcatgggaaaggtgccagacgcttgcactgcctgcgatctggtcaatgtggatttggatgactgcatctctgaacaataaatgatttaaatcaggtatggctgccgatggttatcttccagattggctcgaggacactctctctgaaggaataagacagtggtggaagctcaaacctggcccaccaccaccaaagcccgcagagcggcataaggacgacagcaggggtcttgtgcttcctgggtacaagtacctcggacccttcaacggactcgacaagggagagccggtcaacgaggcagacgccgcggccctcgagcacgacaaggcctacgaccggcagctcgacagcggagacaacccgtacctcaagtacaaccacgccgacgcggagtttcaggagcgccttaaagaagatacgtcttttgggggcaacctcggacgagcagtcttccaggcgaaaaagagggttcttgaacctctgggcctggttgaggaacctgttaagacggctccgggaaaaaagaggccggtagagcactctcctgtggagccagactcctcctcgggaacaggaaaagcgggcaaccagcctgcaagaaaaagattgaatttcggtcagactggagacgcagactccgtacctgacccccagcctctcggacagccaccagcagccccctctggtctgggaactaatacgatggcttcaggcagtggcgcaccaatggcagacaataacgagggcgccgacggagtgggtaattcctcgggaaattggcattgcgattccacatggatgggcgacagagtcatcaccaccagcacccgaacctgggctctgcccacctacaacaaccatctctacaagcagatttccagccaatcaggagcctcaaacgacaaccactactttggctacagcaccccttgggggtattttgacttcaacagattccactgccacttttcaccacgtgactggcaaagactcatcaacaacaactggggattccggcccaaaagactcaacttcaagctttttaacattcaagtcaaagaggtcacgcagaatgacggtacgacgacgattgccaataaccttaccagcacggttcaggtgtttactgactcggagtaccagctcccgtacgtccttggctcggcgcatcaaggatgcctcccgccgttcccagcagacgtcttcatggtgccacagtatggatacctcaccctgaacaacgggagtcaggcagtaggacgctcttcattttactgcctggagtactttccttctcaaatgctgcgtaccggaaacaactttaccttcagctacacctttgaggacgttcctttccacagcagctacgctcacagccagagtttggaccgtctcatgaatcctctcatcgaccagtacctgtattacttgagcagaacaaacactccaagcggaaccaccacgcagtccaggcttcagttttctcaggccggagcgagtgacattcgggaccagtctaggaactggcttcctggaccctgttaccgccagcagcgagtatcaaagacagctgcggacaacaacaacagtgagtactcgtggactggagctaccaagtaccacctcaatggaagagactctctggtgaatccgggcccggccatggccagccacaaggacgatgaagaaaagttttttcctcaaagcggggttctcatctttgggaagcaaggctcagagaaaacaaatgtggacattgaaaaggtcatgattacagacgaagaggaaatcaggaccaccaatcccgtggctacggagcagtatggtgctgtatctaccaacctccagagcggcaacacacaagcagctacctcagatgtcaacacacaaggtgttcttccaggcatggtctggcaggacagagacgtgtacctgcaggggcccatctgggcaaagattccacacacggacggacattttcacccctctcccctcatgggcggatttggattgaagcaccctcccccgcagattctcatcaagaacaccccggtacctgcgaatccttcgaccaccttcagtgcagcaaagtttgcttccttcatcacacagtattccacggggcaggtcagcgtggagatcgagtgggagctgcagaaggagaacagcaaacgctggaaccccgagatccagtacacttccaactataacaagtctgttaatgtggactttactgtggacactaatggcgtgtattcagagcctcgccccattggcaccagatacctgactcgtaatctgtaattgcttgttaatcaataaaccgtttaattcgtttcagttgaactttggtctctgcgtacttattttttatctagtttccatggctacgtagataagtagcatggagggttaatcattatctataaggaacccctagtgatggagttggccactccctctctgcgcgctcgctcgctcactgaggccgggcgaccaaaggtcgcccgacgcccgggctttgcccgggcggcctcagtgagcgagcgagcgcgcagagagggagtggccaa

SEQ ID NO: 69 - DNA, 4679 bp, adeno-associated virus 2
ttggccactccctctctgcgcgctcgctcgctcactgaggccgggcgaccaaaggtcgcccgacgcccgggctttgcccgggcggcctcagtgagcgagcgagcgcgcagagagggagtggccaactccatcactaggggttcctggaggggtggagtcgtgacgtgaagtacgtcatagggttagggaggtcctgtattagaggtcacgtgagtgttttgcgacattttgcgacaccatgtggtcacgcttggtatttaagcccgagtgagcacgcagggtctccattttgaagcgggaggtttgaacgcgcagccgccatgccgggattttacgagattgtgattaaggtccccagcgaccttgacgagcatctgcccggtatttctgacagctttgtgaactgggtggccgagaaggaatgggagttgccgccagattctgacatggatctgaatctgattgagcaggcacccctgaccgtggccgagaagctgcagcgcgactttctgacggagtggcgccgcgtgagtaaggccccggaggccctcttctttgtgcaatttgagaagggagagagctacttccacatgcacgtgctggtggagaccaccggggtgaaatccatggttttgggacgtttcctgagtcagattcgcgaaaaactgattcagagaatttaccgcgggatcgagccgactttgccaaactggttcgcggtcacaaagacccgaaatggcgccggaggcgggaacaaggtggttgatgagtgctacatccccaattacctgctccccaaaacccagcctgagctccagtgggcgtggactaatatggaacagtatttaagcgcctgtttgaatctcgcggagcgtaaacggttggtggcgcagcatctgacgcacgtgtcgcagacgcaggagcagaacaaagagaatcagaatcccaattctgacgcgccggtgattagatcaaaaacctcagccaggtacatggagctggtcgggtggctcgtggataaggggattacctcggagaagcagtggatccaggaggaccaggcttcatacatctccttcaatgcggcctccaactcgcggtcccaaatcaaggctgctctggacaatgcgggaaaaatcatgagcctgactaaaaccgcccccgactacctggtgggccagcagcccgtggaggacatttccagcaatcggatttataaaatcttggaactgaacgggtacgatccccaatatgcggcttccgtctttctgggatgggccacgaaaaagttcggcaagaggaacaccatctggctgtttgggcctgcaactaccgggaagaccaacatcgcggaggccatagcccacactgtgcccttctacgggtgcgtaaactggaccaatgagaactttcccttcaacgactgcgtcgacaagatggtgatctggtgggaggagggaaagatgaccgccaaggtcgtggagtcggccaaagccattctcggaggaagcaaggtgcgcgtggaccagaaatgcaagtcctcggcccagatagacccgactcccgtgatcgtcacttccaacaccaacatgtgcgccgtgattgacgggaactcaacgaccttcgaacaccagcagccgttgcaagaccggatgtgcaaatttgaactcacccgccgtctggatcatgactttgggaaggtcaccaagcaggaagtcaaagactttttccggtgggcaaaggatcacgtggttgaggtggagcatgaattctacgtcaaaaagggtggagccaagaaaagacccgcccccagtgacgcagatataagtgagcccaaacgggcgcgcgagtcagttgcgcagccatcgacgtcagacgcggaagcttcgatcaactacgcggacaggtaccaaaacaaatgttctcgtcacgtgggcatgaatctgatgctgtttccctgcagacaatgcgagagaatgaatcagaattcaaatatctgcttcactcacggacagaaagactgtttagagtgctttcccgtgtcagaatctcaacccgtttctgtcgtcaaaaaggcgtatcagaaactttgctacattcatcatatcatgggaaaggtgccagacgcttgcactgcctgcgatctggtcaatgtggatttggatgactgcatctctgaacaataaatgatttaaatcaggtatggctgccgatggttatcttccagattggctcgaggacactctctctgaaggaataagacagtggtggaagctcaaacctggcccaccaccaccaaagcccgcagagcggcataaggacgacagcaggggtcttgtgcttcctgggtacaagtaccttggacccttcaacggactcgacaagggagagccggtcaacgaggcagacgccgcggccctcgagcacgacaaggcctacgaccggcagctcgacagcggagacaacccgtacctcaagtacaaccacgccgacgcggagtttcaggagcgccttaaagaagatacgtcttttgggggcaacctcggacgagcagtcttccaggcgaaaaagagggttcttgaacctctgggcctggttgaggaacctgttaagacggctccgggaaaaaagaggccggtagagcactctcctgcggagccagactcctcctcgggaaccggaaaagcgggcaaccagcctgcaagaaaaagactgaatttcggtcagactggagacgcagactccgtacctgacccccagcctctcggacagccaccagcagccccctctggtctgggaactaatacgatggcttcaggcagtggcgcaccaatggcagacaataacgagggcgccgacggagtgggtaattcctcgggaaattggcattgcgattccacatggatgggcgacagagtcatcaccaccagcacccgaacctgggccctgcccacctacaacaaccatctctacaagcagatttccagccaatcaggagcttcaaacgacaaccactactttggctacagcaccccctgggggtattttgacttcaacagattccactgccacttctcgccacgtgactggcagagactcatcaacaacaactggggattccgacccaagagactcaacttcaagctctttaacattcaagtcaaagaggtcacgcagaatgacggtacgacgacgattgccaataaccttaccagcacggttcaggtgtttactgactcggagtaccagctcccgtacgtcctcggctcggcgcatcaaggatgcctcccgccgttcccagcagacgtcttcatggtgccacagtatggatacctcaccctgaacaacgggagtcaggcagtaggacgctcttcattttactgcctggagtactttccttctcagatgctgcgtaccggaaacaactttaccttcagctacacctttgaggacgttcctttccacagcagctacgctcacagccagagtttggaccgtctcatgaatcctctcatcgaccagtacctgtattacttgagcagaacaaacacgccaagcggaaccaccacgcagtccagacttcagttttctcaggccggagcaagtgacattcgggaccagtctaggaactggcttcctggaccctgttaccgccagcagcgagtatcaaagacatctgcggataacaacaacagtgaatactcgtggactggagctaccaagtaccacctcaatggcagagactctctggtgaatccgggcccggccatggccagccacaaggacgatgaagaaaagttttttcctcaaagcggggttctcatctttggaaaacaaggctcagagaaaacaaatgtggacattgaaaaggtcatgattacagacgaagaggaaatcaggaccaccaatcccgtggctacggagcagtatggtgctgtatctaccaacctccagagcggcaacacacaagcagctacctcagatgtcaacacacaaggcgttcttccaggcatggtctggcaggacagagacgtgtacctgcaggggcccatctgggcaaagattccacacacagacggacattttcacccctctcccctcatgggcggatttggattaaagcaccctcccccgcaaattctcattaagaataccccggtacctgcaaatccttctaccactttcagcgcggcaaagtttgcttctttcatcacacagtactccacggggcaggtcagcgtggagatcgagtgggagctgcagaaggagaacagcaaacgctggaatcccgagattcaatacacttccaactacaacaaatctgttaatgtggactttactgtggacactaatggtgtgtattcagagcctcgccccattggcaccagatacctgactcgtaatctgtaattgcttgttaatcaataaaccgtttaattcgtttcagttgaactttggtctctgtgtacttctttcttatctagtttccatggctacgtagataagtaccatggatggttaatcattaactataaggaacccctagtgatggagttggccactccctctctgcgcgctcgctcgctcactgaggccgggcgaccaaaggtcgcccgacgcccgggctttgcccgggcggcctcagtgagcgagcgagcgcgcagagagggagtggccaa

SEQ ID NO: 70 - DNA, 4678 bp, adeno-associated virus 2
ttggccactccctctctgcgcgctcgctcgctcactgaggccgggcgaccaaaggtcgcccgacgtccgacctttggtcgcccggcctcagtgagcgagcgagcgcgcagagagggagtggccaactccatcactaggggttcctggaggggtggagtcgtgacgtgaagtacgtcatagggttagggaggtcctgtattagaggtcacgtgagtgttttgcgacattttgcgacaccatgtggccacgctgggtatttaagcccgagtgagcacgcagggtctccattttgaagcgggaggtttgaacgcgcagccgccatgccggggttttacgagattgtgattaaggtccccagcgaccttgacgagcatttgcccggcatttctgacagctttgtgaactgggtggccgagaaggaatgggagttgccgccagattctgacatggatctgaatttgattgagcaggcacccctgaccgtggccgagaagctgcagcgcgactttctgacggagtggcgccgcgtgagtaaggccccggaggccctcttctttgtgcaatttgagaagggagagagctacttccacatgcacgtgctggtggagactaccggggtgaaatccatggttttgggacgtttcctgagtcagattcgcgaaaaactgattcagagaatttaccgcgggatcgagccgactttgccaaactggttcgcggtcacaaagacccgaaatggcgccggaggcgggaacaaggtggtggatgagtgctacatccccaattacctgctccccaaaacccagcctgagctccagtgggcgtggactaatatggaacagtatttaagcgcctgtttgaatctcgcggagcgtaaacggttggtggcgcagcatctgacgcacgtgtcgcagacgcaggagcagaacaaagagaatcagaatcccaattctgacgcgccggtgattagatcaaaaacctcagccaggtacatggagctggtcgggtggctcgtggacaaggggattacctctgagaagcagtggatccaggaggaccaggcctcatacatctccttcaatgcggcctccaactcgcggtcccagatcaaggctgctctggacaatgcgggaaagatcatgagcctgactaaaaccgcccccgactacctggtgggccagcagcccgtggaggacatttccagcaatcggatttataaaatcttggaactgaacgggtacgatccccaatatgcggcttccgtctttctgggatgggccacgaaaaagttcggcaagaggaacaccatctggctgtttgggcctgcaactaccgggaagaccaacatcgcagaggccatagcccacactgtgcccttctacgggtgcgtaaactggaccaatgagaactttccattcaacgactgtgtcgacaagatggtgatctggtgggaggagggaaagatgaccgccaaggttgtggagtcggccaaagctattctcggaggaagcaaggtgcgcgtggaccagaaatgcaagtcctcggcccagatagacccgactcccgtgatcgtcacctccaacaccaacatgtgcgccgtgattgacgggaactcaacgacctttgagcaccagcagccgttgcaagaccggatgttcaaatttgaactcacccgccgtctggatcatgactttgggaaggtcaccaagcaggaagtcaaagactttttccggtgggcaaaggatcacgtggttgaggtggagcatgaattctacgtcaaaaagggtggagccaagaaaagacccgcccccagtgacgcagatataagtgagcccaaacgggcgcgcgagtcagttgcgcagccatcgacgtcagacgcggaagcttcgatcaactacgcggacaggtaccaaaacaaatgttctcgtcacgtgggcatgaatctgatgctgtttccctgcagacaatgcgagagaatgaatcagaattcaaatatctgcttcactcacggacagaaagactgtttagagtgctttcccgtgtcagaatctcaacccgtttctgtcgtcaaaaaggcgtatcagaaactgtgctacattcatcacatcatgggaaaggtgccagacgcttgcactgcctgcaatctggtcaatgtggatttggatgactgcatctctgaacaataaatgatttaaatcaggtatggctgccgatggttatcttccagattggctcgaggacactctctctgaaggaataagacagtggtggaagctcaaacctggcccaccaccaccaaagcccgcagagcggcataaggacgacagcaggggtcttgtgcttcctgggtacaagtacctcggacccttcaacggactcgacaagggagagccggtcaacgaggcagacgccgcggccctcgagcacgacaaggcctacgaccggcagctcgacagcggagacaacccgtacctcaagtacaaccacgccgacgcggagtttcaggagcgccttaaagaagatacgtcttttgggggcaacctcggacgagcagtcttccaggcaaaaaagagggttcttgaacctctgggcctggttgaggaacctgttaagacggctccgggaaaaaagaggccggtagagcactctcctgcggagccagactcctcctcgggaaccggaaaggcgggcaaccagcctgcaagaaaaagattgaatttcggtcagactggagacgcagactccgtacctgacccccagcctctcggacagccaccagcagccccctctggtctgggaactaatacgatggctacaggcagtggcgcaccaatggcagacaataacgagggcgccgacggagtgggtaattcctcgggaaattggcattgcgattccacatggatgggcgacagagtcatcaccaccagcacccgcacctgggctctgcccacctacaacaaccatctgtacaagcagatttccagccaatcaggagcctcaaacgacaaccactactttggctacagcaccccctgggggtattttgacttcaacagattccactgccacttttcaccacgtgactggcaaagactcatcaacaacaactggggattccggcccaagagactcaacttcaagctctttaacattcaagtcaaggaggtcacgcagaatgacggtacgacgacgattgccaataaccttaccagcacggttcaggtgtttactgactcggagtaccagctcccgtacgtcctcggctcggcgcatcaaggatgcctcccgccgttcccagcagacgtcttcatggtgccacagtatggatacctcaccctgaacaacgggagtcaggcagtaggacgctcttcattttactgcctggagtactttccttctcagatgcttcgtaccggaaacaactttaccttcagctacacctttgaagacgtgcctttccacagcagctacgctcacagtcaaagtctggaccgtctcatgaatcctctcatcgaccagtacctgtattacttgagcagaacaaacactccaagcggaaccactacgcagtccaggcttcagttttctcaggccggagcgagtgacattcgggaccagtctaggaactggcttcctggaccctgttaccgccagcagcgagtatcaaagacagctgcggacaacaacaacagtgaatactcgtggactggagctaccaagtaccacctcaatggcagagactctctggtgaatccgggcccggccatggccagccacaaggacgatgaagaaaagttttttcctcaaagcggggttctcatctttgggaagcaaggctcagagaaaacaaatgtggacattgaaaaggtcatgattacagacgaagaggaaatcaggaccaccaatcccgtggctacggagcagtatggttctgtatctaccaacctccagagcggcaacacacaagcagctaccgcagatgtcaacacacaaggcgttcttccaggcatggtctggcaggacagagacgtgtacctgcaggggcctatctgggcaaagattccacacacggacggacattttcacccctctcccctcatgggcggatttggactgaagcaccctcctccacagattctcatcaagaacaccccggtacctgcgaatccttctaccactttcagtgcggcaaaatttgcttctttcatcacacagtactccacggggcaggtcagcgtggagatcgagtgggagctgcagaaggagaacagcaaacgctggaatcccgagattcagtacacttcaaactacaacaagtctgttaatgtggactttactgtggacactaatggcgtgtattcagagcctcgccccattggcaccagatacctgactcgtaatctgtaattgcttgttaatcaataaaccgtttaattcgtttcagttgaactttggtctctgcgtacttctttcttatctagtttccatggctacgtagataagtaccatggagggttaatcattaacacaaggaacccctagtgatggagttggccactccctctctgcgcgctcgctcgctcactgaggccgggcgaccaaaggtcgcccgacgcccgggctttgcccgggcggcctcagtgagcgagcgagcgcgcagagagggagtggccaa

SEQ ID NO: 71 - DNA, 4680 bp, adeno-associated virus 2
ttggccactccctctctgcgcgctcgctcgctcactgaggccgcccgggcaaagcccgggcgtcgggcgacctttggtcgcccggcctcagtgagcgagcgagcgcgcagagagggagtggccaactccatcactaggggttcctggaggggtggagtcgtgacgtgaagtacgtcatagggttagggaggtcctgtattagaggtcacgtgagtgttttgcgacattttacgacaccatgtggtcacgctgggtatttaagcccgagtgagcacgcagggtctccattttgaagcgggaggtttgaacgcgcagccgccatgccggggttttacgagattgtgattaaggtccccagcgaccttgacgagcatctgcccggcatttctgacagctttgtgaactgggtggccgagaaggaatgggagttgccgccagattctgacatggatctgaatctgattgagcaggcacccctgaccgtggccgagaagctgcagcgcgactttctgacggaatggcgccgtgtgagtaaggccccggaggccctcttctttgtgcaatttgagaagggagaaagctacttccacatgcacgtgctcgtggagaccaccggggtgaaatccatggttttgggacgtttcctgagtcagattcgcgaaaaactgattcagagaatttaccgcgggatcgagccgactttgccaaactggttcgcggtcacaaagacccgaaatggcgccggaggcgggaacaaggtggtggatgagtgctacatccccaattacctgctccccaaaacccagcctgagctccagtgggcgtggactaatatggaacagtatttaagcgcctgtttgaatctcgcggagcgtaaacggttggtggcgcagcatctgacgcacgtgtcgcagacgcaggagcagaacaaagagaatcagaatcccaattctgacgcgccggtgattagatcaaaaacctcagccaggtacatggagctggtcgggtggctcgtggacaaagggattacctcggagaagcagtggatccaggaggaccaggcctcatacatctccttcaatgcggcctccaactcgcggtcccagatcaaggctgctctggacaatgcgggaaaaatcatgagcctgactaaaaccgcccccgactacctggtgggccagcagcccgtggaggacatttccagcaatcggatttataaaatcttggaactgaacgggtacgatccccaatacgcggcttccgtatttctgggatgggccacgaaaaagttcggcaagaggaacaccatctggctgtttgggcctgcaactaccgggaagaccaacatcgcggaggccatagcccacactgtgcccttctacgggtgcgtaaactggaccaatgagaactttccattcaatgactgcgtcgacaagatggtgatctggtgggaggagggaaagatgaccgccaaggtcgtggagtcggccaaagccattctcggaggaagcaaggtgcgcgtggaccagaaatgcaagtcctcggcccagatagacccgactcccgtgatcgtcacctccaacaccaacatgtgcgccgtgattgacgggaactcaacgaccttcgagcaccagcagccgttgcaagaccggatgttcaaatttgaactcacccgccgtctggatcatgactttgggaaggtcaccaagcaggaagtcaaagactttttccggtgggcaaaggatcacgtggttgaggtggagcatgaattctacgtcaaaaagggtggagccaagaaaagacccgcccccagtgacgcagatataagtgagcccaaacgggtgcgcgagtcagttgcgcagccatcgacgtcagacgcggaagcttcgatcaactacgcggacaggtaccaaaacaaatgttctcgtcacgtgggcatgaatctgatgctgtttccctgcagacaatgcgagagaatgaatcagaattcaaatatctgcttcactcacggacagaaagactgtttagagtgctttcccgtgtcagaatctcaacccgtttctgtcgtcaaaaaggcgtatcagaaactttgctacattcatcatatcatgggaaaggtgccagacgcttgcactgcctgcgatctggtcaatgtggatttggatgactgcatctctgaacaataaatgatttaaatcaggtatggctgccgatggttatcttccagattggctcgaggacactctctctgaaggaataagacagtggtggaagctcaaacctggcccaccaccaccaaagcccgcagagcggcatcaggacgacagcaggggtcttgtgcttcctgggtacaagtacctcggacccttcaacggactcgacaagggagagccggtcaacgaggcagacgccgcggccctcgagcacgacaaggcctacgaccggcagctcgacagcggagacaacccgtacctcaagtacaaccacgccgacgcggagtttcaggagcgccttaaagaagatacgtcttttgggggcaacctcggacgagcagtcttccaggcgaaaaagagggttcttgaacctctgggcctggttgaggaacctgttaagacggctccgggaaaaaagaggccggtagagcactctcctgcggagccagactcctcctcgggaaccggaaaagcgggcaaccagcctgcaagaaaaagattgaatttcggtcagactggagacgcagactccgtacctgacccccagcctctcggacagccaccagcagccccctctggtctgggaactaatacgatggctacaggcagtggcgcaccaatggcagacaataacgagggcgccgacggagtgggtaattcctcgggaaattggcattgcgattccacatggatgggcgacagagtcatcaccaccagcacccgcacctgggctctgcccacctacaacaaccatctgtacaagcagatatccagccagtctggagccagcaacgacaaccactactttggctacagcaccccctgggggtattttgacttcaacagattccactgccacttttcaccacgtgactggcaaagactcatcaacaacaactggggattccgaccaaaaagactcaacttcaagctctttaacattcaagtcaaggaggtcacgcagaatgacggtacgacaacgattgccaataaccttaccagcacggttcaggtgtttactgactcggagtaccagctcccgtacgtcctcggctcggcgcatcaaggatgcctcccgccgttcccagcagacgtcttcatggtgccacagtatggatacctcaccctgaacaacgggagtcaggcagtaggacgctcttcattttactgcctggagtactttccttctcagatgcttcgtaccggaaacaactttaccttcagctacacctttgaagacgtgcctttccacagcagctacgctcacagtcaaagtctggaccgtctcatgaatcctctcatcgaccagtacctgtattacttgagcagaacaaacactccaagcggaaccaccacgcagtccaggcttcagttttctcaggccggagcgagtgacattcgggaccagtctaggaactggcttcctggaccctgttaccgccagcagcgagtatcaaagacagctgcggataacaacaacagtgaatattcgtggactggagctaccaagtaccacctcaatggcagagactctctggtgaatccgggcccggccatggccagccacaaggacgatgaagaaaagttttttcctcaaagcggggttctcatctttgggaagcaaggctcagagaaaacaaatgtggacattgaaaaggtcatgattacagacgaagaggaaatcaggaccaccaatcccgtggctacggagcagtatggttctgtatctaccaacctccagagcggcaacacacaagcagctacctcagatgtcaacacacaaggcgttcttccaggcatggtctggcaggacagagatgtgtacctgcaggggcctatctgggcaaagattccacacacggacggacattttcacccctctcccctcatgggcggatttggacttaaacaccctcctccacagattctcatcaagaacaccccggtacctgcaaatccttcgaccaccttcagtgcggcaaagtttgcttctttcatcacacagtactccacggggcaggtcagcgtggagatcgagtgggagctacagaaggagaacagcaaacgctggaatcccgagattcagtacacttccaactacaacaaatctgttaatgtggactttactgtggacactaatggtgtgtattcagagcctcgccccattggcaccagatacctgactcgtaatctgtaattgcttgttaatcaataaaccgtttaattcgtttcagttaaactttggtctccgcgtacttcttttcttatctagtttccatggctacgtagataagtaccatggcgggttaatcattaactctaaggaacccctagtgatggagttggccactccctctctgcgcgctcgctcgctcactgaggccgggcgaccaaaggtcgcccgacgcccgggctttgcccgggcggcctcagtgagcgagcgagcgcgcagactgaaacgaattaa

SEQ ID NO: 72 - DNA, 4679 bp, adeno-associated virus 2
ttggccactccctctctgcgcgctcgctcgctcactgaggccgggcgaccaaaggtcgcccgacgcccgggctttgcccgggcggcctcagtgagcgagcgagcgcgcagagagggagtggccaactccatcactaggggttcctggaggggtggagtcgtgacgtgaattacgtcatagggttagggaggtcctgtattagaggtcacgtgagtgttttgcgacattttgcgacaccatgtggtcacgctgggtatttaagcccgagtgagcacgcagggtctcsattttgaagcgggaggtttgaacgcgcagccgccatgccgggattttacgagattgtgattaaggtccccagcgaccttgacgagcatctacccggcatttctgacagctttgtgaactgggtagccgagaaggaatgggagttgccgccagattctgacatggatctgaatctgattgagcaggcacccctgaccgtggccgagaagctgcagcgcgactttctgacggagtggygccgcgtgagtaaggccccggaggccctcttctttgtgcaatttgagaagggagagagctacttccacatgcacgtgctggtggagacaaccggggtgaaatccatggttttgggacgtttcctgagtcagattcgcgaaaaactgattcagagaatctaccgcgggatcgagccgactttgccaaactggttcgcggtcacaaagacccgaaatggcgccggaggcgggaacaaggtggtggatgagtgctacatccccaattacctgctccccaaaacccagcctgagctccagtgggcgtggactaatatggaacggtatttaagcgcctgtttgaatctcgcggagcgtaaacggttggtggcgcagcatctgacgcacgtgtcgcagacgcaggagcagaacaaagagaatcagaatcccaattctgacgcgccggtgattagatcaaaaacctcagccagrtacatggagctggtcgggtggctcgtggataaggggattacctcggagaagcagtggatccaggaggaccaggcttcatacatctccttcaatgcggcctccaactcgaggtcccaaatcaaggctgccttggacaatgcggggaagattatgagcctgactaaaaccgcccccgactacctggtgggccagcagcccgtggaggacatttccagcaatcggatttataaaatcttggaactgaacgggtacgatccccaatatgcggcttccgtcttcttgggatgggctacgaaaaagttcggcaagaggaacaccatctggctgtttgggcctgcaactaccgggaagaccaacatcgcggaggccatagcccacactgttcccttctacgggtgcgtaaactggaccaatgagaactttcccttcaacgactgtgtcgacaagatggtgatctggtgggaggaggggaagatgaccgccaaggtcgtggagtcggccaaagccattctcggaggaagcaaagtgcgtgtggaccagaaatgcaagtcctcggcccagatagacccgactcccgtgatcgtcacctccaacaccaacatgtgcgccgtgattgacgggaactcaacgaccttcgaacaccagcagccgttgcaagaccggatgttcaaatttgaactcacccgccgtctggatcatgactttcccgtggccaccaagcaggaagtcaaagattttttccggtgggcaaaggatcacgtggttgaggtggagcatgaattctacgtcaaaaagggtggagccaagaaaagacccgcccccagtgacgcagatataagtgagcccaaacgggcgcgcgagtcagttgcgcagccatcgacgtcagacgcggaagcttcgatcaactacgcggacaggtaccaaaacaaatgttctcgtcacgtgggcatgaatctgatgctgtttccctgcagacaatgcgagagaatgaatcagaattcaaatatctgcttcactcacggacagaaagactgtttagagtgctttcccgtgtcagaatctcaacccgtttctgtcgtcaaaaaggcgtatcagaaactgtgctacatycatcatatcatgggaaaggtgccagacgcttgcactgcctgcgatctggtcaatgtggatttggatgactgcatctctgaacaataaatgatttaaatcaggtatggctgccgatggttatcttccagattggctcgaggacactctctctgaaggaataagacagtggtggaagctcaaacctggcccaccaccaccaaagcccgcagagcggcataaggacgacagcaggggtcttgtgcttcctgggtacaagtacctcggacccttcaacggactcgacaagggagagccggtcaacgaggcagacgccgcggccctcgaacacgacaaggcctacgaccggcagctcgacagcggagacaacccgtacctcaagtacaaccacgccgacgcggagtttcaggagcgccttaaagaagatacgtcttttgggggcaacctcggacgagcagtcttccaggccaaaaagagggttcttgaacctctgggcctggttgaggagcctgttaagacggctccgggaaaaaagaggccagtagagcactctcctgcggagccagactcctcctcgggaaccggaaaagcgggcaaccagcctgcaagaaagagattgaatttcggtcagactggagacgcagactccgtacctgacccccagcctctcggacagccaccagcagccccctctggtctgggaactaatacgatggctacaggcagtggcgcaccaatggcagacaataacgagggcgccgacggagtgggtaattcctcgggaaattggcattgcgattccacatggatgggcgacagagtcatcaccaccagcacccgaacctgggccctgcccacctacaacaaccacctctacaagcagatttccagccagtctggagccagcaacgacaaccactactttggctacagcaccccctgggggtattttgacttcaacagattccactgccacttttcaccacgtgactggcaaagactcatcaacaacaactggggattccgaccaaaaagactcaacttcaagctctttaacattcaagtcaaggaggtcacgcagaatgacggtacgacgacgattgccaataaccttaccagcacggttcaggtgtttactgactcggagtaccagctcccgtacgtcctcggctcggcgcatcaaggatgcctcccgccgttcccagcagacgtcttcatggtgccacagtatggatacctcaccctgaacaacgggagtcaggcagtaggacgctcttcattttactgcctggagtactttccttctcagatgcttcgtaccggaaacaactttaccttcagctacacctttgaagacgtgcctttccacagcagctacgctcacagtcaaagtctggaccgtctcatgaatcctctcatcgaccagtacctgtattacttgagcagaacaaacactccaagcggaaccactacgcagtccaggcttcagttttctcaggccggagcgagtgacattcgggaccagtctaggaactggcttcctggaccctgttaccgccagcagcgagtatcaaagacagctgcggacaacaacaacagtgaatactcgtggactggagctaccaagtaccacctcaatggcagagactctctggtgaatccgggcccggccatggccagccacaaggacgatgaagaaaagttttttcctcaaagcggggttctcatctttgggaagcaaggctcagagaaaacaaatgtggacattgaaaaggtcatgattacagacgaagaggaaatcaggaccaccaatcccgtggctacggagcagtatggttctgtatctaccaacctccagagcggcaacacacaagcagctaccgcagatgtcaacacacaaggcgttcttccaggcatggtatggcaggacagagacgtgtacctgcaggggcctatctgggcaaagattccacacacggacggacattttcacccctctcccctcatgggcggatttggacttaaacaccctcctccacagattctcatcaagaacaccccggtacctgcaaatccttcgaccaccttcagtgcggcaaagtttgcttctttcatcacacagtactccacggggcaggtcagtgtggagattgagtgggagctgcagaaggagaacagcaaacgctggaatcccgagatccagtacacttccaactacaacaartctgttaatgcggaccttactgtggacactaatggtgtgtattcagagcctcgccccattggcaccagatacctgactcgtaatctgtaattgcttgttaatcaataaaccgtttaattcgtttcagttgaactttggtctctgcgtgcttctttcttatctagtttacatggctacgtagataagtagcatggcgggttaatcattaactacaaggaacccctagtgatggagttggccactccctctctgcgcgctcgctcgctcactgaggccgggcgaccaaaggtcgcccgacgcccgggctttgcccgggcggcctcagtgagcgagcgagcgcgcagagagggagtggccaa

SEQ ID NO: 73 - DNA, 4680 bp, adeno-associated virus 2
ttggccactccctctctgcgcgctcgctcgctcactgaggccgggcgaccaaaggccctttcccccacaccctttgcccgggcggcctcagtgagcgagcgagcgcgcagagagggagtggccaactccatcactaggggttcctggaggggtggagtcgtgacgtgaagtacgtcatagggttagggaggtcctgtattagaggtcacgtgagtgttttgcgacattttgcgacaccatgtggtcacgctgggtatttaagcccgagtgagcacgcagggtctccattttgaagcgggaggtttgaacgcgcagccgccatgccggggttttacgagattgtgatcaaggtccccagcgaccttgacgagcatctgcccggcatttctgacagctttgtgaactgggtggccgagaaggaatgggagttgccgccagattctgacatggatctgaatctgattgagcaggcacccctgaccgtggccgagaagctgcagcgcgactttctgacggagtggcgccgtgtgagtaaggccccggaggccctcttctttgtgcaatttgagaagggagagagctacttccacatgcacgtgcttgtggagaccaccggggtgaaatccatggttttgggacgtttcctgagtcagattcgcgaaaaactgattcagagaatttaccgcgggatcgagccgactttgccaaactggtttgcggtcacaaagacccgaaatggcgccggaggcgggaacaaggtggtggatgagtgctacatccccaattacctgctccccaaaacccagcctgagctccagtgggcgtggactaatatggaacagtatttaagcgcctgtttgaatctcgcggagcgtaaacggttggtggcgcagcatctgacgcacgtgtcgcagacgcaggagcagaacaaagagaatcagaatcccaattctgacgcgccggtaattagatcaaaaacctcagccaggtacatggagctggttgggtggctcgtggataaggggattacctcggagaagcagtggatccaggaggaccaggcctcgtacatctccttcaatgcggcctccaactcgcggtcgcagatcaaggctgctctggacaatgcgggaaagatcatgagcctgactaaaaccgcccccgactacctggtgggccagcagcccgtggaggacatttccagcaatcggatttataaaatcttggaactgaacgggtacgatccccaatatgcggcttccgtttttctgggatgggccacgaaaaagttcggcaagaggaacaccatctggctgtttgggcctgcaactaccgggaagaccaacatcgcggaggccatagcccacactgtgcccttctacgggtgcgtaaactggaccaatgaaaactttccattcaatgactgtgttgacaagatggtgatctggtgggaggagggaaagatgaccgccaaggtcgtggagtcggccaaagccattctcggcggaagcaaggtgcgcgtggaccagaaatgcaagtcctcggcccagatagacccgactcccgtgatcgtcacttccaacaccaacatgtgcgccgtgattgacgggaactcaacgaccttcgaacaccagcagccgttgcaagaccggatgttcaaatttgaactcacccgccgtctggatcatgactttgggaaggtcaccaagcaggaagtcaaagactttttccggtgggcaaaggatcacgtggttgaggtggagcatgaattctacgtcaaaaagggtggagccaagaaaagacccgcccccagtgacgcatatataagtgagcccaaacgggcgcgcgagtcagttgcgcagccatcgacgtcagacgcggaagcttcgatcaactacgcggacaggtaccaaaacaaatgttctcgtcacgtgggcatgaatctgatgctgtttccctgcagacaatgcgagagaatgaatcagaattcaaatatctgcttcactcacggacagaaagactgtttagagtgctttcccgtgtcagaatctcaacccgtttctgtcgtcaaaaaggcgtatcagaaactgtgctacattcatcatatcatgggaaaggtgccagatgcttgcactgcctgcgatctggtcaatgtggatttggatgactgcatctctgaacaataaatgatttaaatcaggtatggctgccgatggttatcttccagattggctcgaggacactctctctgaaggaataagacagtggtggaagctcaaacctggcccaccaccaccaaagcccgcagagcggcataaggacgacagcaggggtcttgtgcttcctgggtacaagtacctcggacccttcaacggactcgacaagggagagccggtcaacgaggcagacgccgcggccctcgagcacgacaaggcctacgaccggcagctcgacagcggagacaacccgtacctcaagtacaaccacgccgacgcggagtttcaggagcgccttaaagaagatacgtcttttgggggcaacctcggacgagcagtcttccaggcgaaaaagagggttcttgaacctctgggcctggttgaggaacctgttaagacggctccgggaaaaaagaggccggtagagcactctcctgtggagccagactcctcctcgggaaccggaaaggcgggcaaccagcctgcaagaaagagattgaatttcggtcagactggagacgcagactccgtacctgacccccagcctctcggacagccaccagcagccccctctggtctgggaactaatacgatggctacaggcagtggcgcaccaatggcagacaataacgagggcgccgacggagtgggtaattcctcgggaaattggcattgcgattccacatggatgggcgacagagtcatcaccaccagcacccgcacctgggctctgcccacctacaacaaccatctgtacaagcagatttccagccagtctggagccagcaacgacaaccactactttggctacagcaccccctgggggtattttgacttcaacagattccactgccacttttcaccacgtgactggcaaagactcatcaacaacaactggggattccgacccaagagactcaacttcaagctctttaacattcaagtcaaagaggtcacgcagaatgacggtacgacgacgattgccaataaccttaccagcacggttcaggtgtttactgactcggagtaccagctcccgtacgtcctcggctcggcgcatcaaggatgcctcccgccgtttccagcggacgtcttcatggtgccacagtatggatacctcaccctgaacaacgggagtcaggcggtaggacgctcttccttttactgcctggagtactttccttctcagatgcttcgtaccggaaacaactttaccttcagctacacctttgaagacgttcctttccacagcagctacgctcacagtcaaagtttggaccgtctcatgaatcctctcatcgaccagtacctgtattacttgagcagaacaaacactccaagcggaaccactacgcagtccaggcttcagttttctcaggccggagcaagtgacattcgggaccagtctaggaactggcttcctggaccctgttaccgccagcagcgagtatcaaagacagctgcggataacaacaacagtgaatactcgtggactggagctaccaagtaccacctcaatggcagagactctctggtgaatccaggcccggccatggccagccacaaggacgatgaagaaaagttttttcctcagagcggggttctcatctttgggaagcaaggctcagagaaaacaaatgtggacattgaaaaggtcatgattacagacgaagaggaaatcaggaccaccaatcccgtggctacggagcagtatggtgctgtatctaccaacctccagagcggcaacacacaagcagctacctcagatgtcaacacacaaggcgttcttccaggcatggtctggcaggacagagacgtgtacctgcaggggcccatctgggcaaagattccacacacggacggacattttcacccctctcccctcatgggcggattcggactgaagcaccctcctccacagattctcatcaagaacaccccggtacctgcgaatccttcgaccaccttcagtgcggcaaagtttgcttccttcatcacacagtattccacggggcaggtcagcgtggagatcgagtgggagctgcagaaggagaacagcaaacgctggaatcccgagatccagtacacttccaactataacaagtctgttaatgtggactttactgtggacactaatggtgtgtattcagagcctcgccccattggcaccagatacctgactcgtaatctgtaattgcttgttaatcaataaaccgtgtaattcgtttcagttgaactttggtctctgcgtacttcttttcttatctagtttccatggctacgtagataagtagcatggcgagttaatcattaactctaaggaacccctagtgatggagttggccactccctctctgcgcgctcgctcgctcactgaggccgcccgggcaaagcccgggcgtcgggcgagctttgcccgggcggcctcagtgagcgagcgagcgcgcagagagggagtggccaa

SEQ ID NO: 74 - DNA, 4678 bp, adeno-associated virus 2
ttggccactccctctctgcgcgctcgctcgctcactgaggccgggcgaccaaaggtcgcccgacgcccgggctttgcccgggcggcctcagtgagcgagcgagcgcgcagagagggagtggccaactccatcactaggggttcctggaggggtggagtcgtgacgtgaagtacgtcatagggttagggaggtcctgtattagaggtcacgtgagtgttttgcgacattttgcgacaccatgtggtcacgctgggtatttaagcccgagtgagcacgcagggtctccattttgaagcgggaggtttgaacgcgcagccgccatgccgggattttacgagattgtgattaaggtccccagcgaccttgacgagcatttgcccggcatttctgacagctttgtgaactgggtggccgagaaggaatgggagttgccgccagattctgacatggatctgaatctgattgagcaggcacccctgaccgtggccgagaagctgcagcgcgactttctgacggagtggcgccgcgtgagtaaggccccggaggccctcttctttgtgcaatttgaaaagggagagagctacttccacatgcacgtgcttgtggagaccaccggggtgaaatccatggttttgggacgtttcctgagtcagattcgcgaaaaactgattcagagaatttaccgcgggatcgagccgactttgccaaactggttcgcggtcacaaagacccgaaatggcgccggaggcgggaacaaggtggtggatgagtgctacatccccaattacctgctccccaaaacccaacctgaactccagtgggcgtggactaatatggaacagtatttaagcgcctgtttgaatctcgcggagcgtaaacggttggtggcgcagcatctgacgcacgtgtcgcagacgcaggagcagaacaaagaaaatcagaatcccaattctgacgcgccggtgattagatcaaaaacctcagccaggtacatggagctggtcgggtggctcgtggataaggggattacgtcggagaagcagtggatccaggaggaccaggcttcatacatctccttcaatgcggcctccaactcgcggtcccagatcaaagctgctctggacaatgcgggaaagatcatgagcctcactaaaactgcccccgactacctggtgggccagcagcccgtggaggacatttccagcaatcggatttataaaatcttggaactgaacgggtacgatccccaatacgctgcttccgtctttctgggatgggccacgaaaaagttcggcaagaggaacaccatctggctgtttgggcctgcaactaccgggaagaccaacatcgcggaggccatagcccacactgtgcccttctacgggtgcgtaaactggaccaatgagaactttcctttcaatgattgcgtcgacaagatggtgatctggtgggaggagggaaagatgaccgccaaggttgtggagtcggccaaagccattctcggaggaagcaaggtgcgcgtggaccaaaagtgcaagtcctcggcccagatagacccgactcccgtgatcgtcacctccaacaccaacatgtgcgccgtgattgacgggaactcaacgaccttcgagcaccagcagccgttgcaagaccggatgttcaaatttgaactcgcccgccgtctggatcatgactttgggaaggtcaccaagcaggaagtcaaagactttttccggtgggcaaaggatcacgtggttgaggtggagcatgaattctacgtcaaaaagggtggagccaagaaaagacccgcccccagtgacgcagatataagtgagcccaaacgggtgcgcgagtcagttgcgcagccatcgacgtcagacgcggaagcttcgatcaactacgcggacaggtaccaaaacaaatgttctcgtcacgtgggcatgaatctgatgctgtttccctgcagacaatgcgaaagaatgaatcagaattcaaatatctgcttcactcacggacagaaagactgtttagagtgctttcccgtgtcagaatctcaacccgtttctgtcgtcaaaaaggcgtatcagaaactttgctacattcatcatatcatgggaaaggtgccagacgcttgcactgcctgcgatctggtcaatgtggatttggatgactgcatctctgaacaataaatgattcaaatcaggtatggctgccgatggttatcttccagattggctcgaggacactctctctgaaggaataagacagtggtggaagctcaaacctggcccaccaccaccaaagcccgcagagcggcataaggacgacggcaggggtcttgtgcttcctgggtacaagtacctcggacccttcaacggactcgacaagggagagccggtcaacgaggcagacgccgcggccctcgagcacgacaaggcctacgaccggcagctcgacagcggagacaacccgtacctcaagtacaaccacgccgacgcggagtttcaggagcgccttaaagaagatacgtcttttgggggcaacctcggacgagcagtcttccaggcgaaaaagagggttcttgaacctctgggcctggttgaggaacctgttaagacggctccgggaaaaaagaggccggtagagcactctcctgcggagccagactcctcctcgggaaccggaaaagcgggccagcagcctgcaagaaaaagactgaatttcggtcagactggagacgcagactccgtacctgacccccagcctctcggacagccaccagcagccccctctggtctgggaactaatacgatggctacaggcagtggcgcaccaatggcagacaataacgagggcgccgacggagtgggtaattcctcgggaaattggcattgcgattccacatggatgggcgacagagtcatcaccaccagcacccgcacctgggctctgcccacctacaacaaccatctgtacaagcagatttccagccagtctggagccagcaacgacaaccactactttggctacagcaccccctgggggtattttgacttcaacagattccactgccacttttcaccacgtgactggcaaagactcatcaacaacaactggggattccgacccaagagactcaacttcaagctctttaacattcaagtcaaagaggtcacgcagaatgacggtacgacgacgattgccaataaccttaccagcacggttcaggtgtttactgactcggagtaccagctcccgtacgtcctcggctcggcgcatcaaggatgcctcccgccgttcccagcggacgtcttcatggtcccacagtatggatacctcaccctgaacaacgggagtcaggcggtaggacgctcttcattttactgcctggagtactttccttctcagatgcttcgtaccggaaacaactttaccttcagctacacctttgaagacgttcctttccacagcagctacgctcacagtcaaagtctggaccgtctcatgaatcctctcatcgaccagtacctatattacttaagcagaacaaacacgccgagcggaaccactacgcagtccaggcttcagttttctcaggccggagcaagtgacattcgggaccagtctaggaactggcttcctggaccctgttaccgccagcagcgagtatcaaagacatctgcggataacaacaacagtgaatactcgtggactggagctaccaagtaccacctcaatggcagagactctctggtgaatccgggcccggccatggccagccacaaggacgatgaagaaaagttttttcctcagagcggggttctcatatttgggaagcaaggctcagagaaaacaaatgtggacattgaaaaggtcatgattacagacgaagaggaaatcaggaccaccaatcccgtggctacggagcagtatggtgctgtatctaccaacctccagagcggcaacacacaagcagctacctcagatgtcaacgcacaaggtgttcttccaggcatggtctggcaggacagagacgtgtacctgcaggggcccatctgggcaaagattccccacacggacggacactttcacccttctcctcttatgggcggattcggacttaaacaccctcccccgcagattctcatcaagaacaccccggtacctgcgaatccttcgaccaccttcagcgcggcaaagtttgcttccttcatcacacagtattccacggggcaggtcagcgtagaaatcgagtgggagctgcagaaggagaacagcaaacgctggaatcccgagatccagtacacttccaactataacaaatctgttaatgtggactttactgtggacactaatggtgtgtattcagagcctcgccccattggcaccagatacctgactcgtaatctgtaattgcttgttaatcaataaaccgtttaattcgtttcagttgaactttggtctctgcgtacttctttcttatctagtttccatggctacgtagataagtagcatggcgggttaatcattaacacaaggaacccctagtgatggagttggccactccctctctgcgcgctcgctcgctcactgaggccgcccgggcaaagcccgggcgtcgggcgacctttggtcgggcggcctcagtgagcgagcgagcgcgcagagagggagtggccaa

SEQ ID NO: 75 - DNA, 4679 bp, adeno-associated virus 2
ttggccactccctctctgcgcgctcgctcgctcactgaggccgggcgaccaaaggtcgcccgacgcccgggctttgcccgggcggcctcagtgagcgagcgagcgcgcagagagggagtggccaactccatcactaggggttcctggaggggtggagtcgtgacgtaaattacgtcatagggttagggaggtcctgtattagaggtcacgtgagtgttttgcgacattttgcgacaccatgtggtcacgctgggtatttaagcccgagtgagcacgcagggtctccattttgaagcgggaggtttgaacgcgcagccgccatgccaggattttacgagattgtgattaaggtccccagcgaccttgacgagcatttgcccggcatttctgacagctttgtgaactgggtggccgagaaggaatgggagttgccgccagattctgacatggatctgaatctgattgagcaggcacccctgaccgtggccgagaagctgcagcgcgactttctgacggagtggcgccgtgtgagtaaggccccggaggccctcttctttgtgcaatttgagaagggagagagctacttccacatgcacgtgctcgtggagaccaccggggtgaaatccatggttttgggacgtttcctgagtcagattcgcgaaaaactgattcagagaatttaccgcgggatcgagccgactttgccaaactggttcgcggtcacaaagacccgaaatggcgccggaggcgggaacaaggtggtggatgagtgctacatccccaattacctgctccccaaaacccagcctgagctccagtgggcgtggactaatatggaacagtatttaagcgcctgtttgaatctcgcggagcgtaaacggttggtggcgcagcatctgacgcacgtgtcgcagacgcaggagcagaacaaagagaatcagaatcccaattctgacgcgccggtgatcagatcaaaaacctcagccaggtacatggagctggtcgggtggctcgtggataaggggattacctcggagaagcagtggatccaggaggatcaggcttcatacatctccttcaatgcggcctccaactcgcggtcccaaatcaaggctgctctggacaatgcgggaaagattatgagcctgactaaaactgcccccgactacctggtgggccagcagcccgtggaggacatttccagcaatcggatttataaaatcttggaactgaacgggtacgatccccaatacgctgcttccgtctttctgggatgggccacgaaaaagttcggcaagaggaacaccatctggctgtttgggcctgcaactaccgggaagaccaacatcgcggaagccatagcccacactgtgcccttctacgggtgcgtaaactggaccaatgagaactttccattcaacgactgtgtcgacaagatggtgatctggtgggaggaggggaagatgaccgccaaggttgtggagtcggccaaagccattctcggaggaagcaaggtgcgcgtggaccagaaatgcaagtcctcggcccagatagacccgactcccgtgatcgtcacctccaacaccaacatgtgcgccgtgattgacgggaactcaacgaccttcgagcaccagcagccgttgcaagaccggatgttcaaatttgaactcacccgccgtctggatcatgactttgggaaggtcaccaagcaggaagtgaaagactttttccggtgggcaaatgatcacgtggtcgaggtggagcatgaattctacgtcaaaaagggtggagccaagaaaagacccgcccccagtgacgcagatataagtgagcccaaacgggcgcgcgagtcagttgcgcagccatcgacgtcagacgcggaagcttcaatcaactacgcggacaggtaccaaaacaaatgttctcgtcacgtgggcatgaatctgatgctgtttccctgcagacaatgcgagagaatgaatcagaattcaaatatctgcttcactcacggacagaaagactgtttagagtgctttcccgtgtcagaatctcaacccgtttctgtcgtcaaaaaggcgtatcagaaactttgctacattcatcatattatgggaaaggtgccagacgcttgcactgcctgcgatctggtcaatgtggatttggatgactgcatctctgaacaataaatgatttaaatcaggtatggctgccgatggttatcttccagattggctcgaggacactctctctgaaggaataagacagtggtggaagctcaaacctggcccaccaccaccaaagcccgcagagcggcataaggacgacagcaggggtcttgtgcttcctgggtacaagtacctcggacccttcaacggactcgacaagggggagccggtcaacgaggcagacgccgcggccctcgagcacgacaaggcctacgaccggcagctcgacagcggagacaacccgtacctcaagtacaaccacgccgacgcggagtttcaggagcgtcttaaagaagatacgtcttttgggggcaacctcggacgagcagtcttccaggcgaaaaagagggttcttgaacctctgggcctggttgaggagcctgttaagacggctccgggaaaaaagaggccggtagagcactctcctgcggagccagactcctcctcgggaaccggaaaagcgggcaaccagcctgcaagaaaaagactgaattttggtcagactggagacgcagactccgtacctgacccccagcctctcggacagccaccagcagccccctctggtctgggaactaatacgatggctacaggcagtggcgcaccaatggcagacaataacgagggcgccgacggagtgggtaattcctcgggaaattggcattgcgattccacatggatgggcgacagagtcatcaccaccagcacccgaacctgggctctgcccacctacaacaaccatctgtacaagcagatttccagccaatcaggagcctcaaacgacaaccactactttggctacagcaccccttgggggtattttgacttcaacagattccactgccacttttcaccacgtgactggcaaagactcatcaacaacaattggggattccgacccaagagactcaacttcaagctctttaacattcaagtcaaagaggtcacgcagaatgacggtacgacgacgatcgccaataaccttaccagcacggttcaggtgtttactgactcggagtaccagctcccgtacgttctcggctcggcgcatcaaggatgcctcccgccgttcccagcagacgtcttcatggtgccacagtatggatacctcaccctgaacaacgggagtcaagcagtaggacgctcttcattttactgcctggaatactttccttctcagatgcttcgtaccggaaacaactttaccttcagctatacctttgaggacgttcctttccacagcagctacgctcacagccagagtttggaccgcctcatgaatcctctcatcgaccagtacctgtattacttgagcagaacaaacactccaagcggaaccaccacgcagtccaggcttcagttttctcaggccggagcaagtgacattcgggaccagtctaggaactggcttcctggaccctgttaccgccagcagcgagtatcaaagacacctgcggataacaacaacagtgaatactcgtggactggagctaccaagtaccacctcaatggcagagactctctggtgaatccgggcccggccatggccagccacaaggacgatgaagaaaagttttttcctcaaagcggggttctcatctttgggaagcaaggctcagagaaaacaaatgtggacattgaaaaggtcatgattacagacgaagaggaaatcaggaccaccaatcccgtggctacggagcagtatggttctgtatctaccaacctccagagcggcaacacacaagcagctaccgcagatgtcaacacacaaggcgttcttccaggcatggtctggcaggacagagacgtgtacctgcaggggcccatctgggcaaagattccacacacggatggacactttcacccttctcctcttatgggaggatttggacttaaacaccctcccccgcagattctcatcaaaaacaccccggtacctgcgaatccttcgaccactttcagtgcagcaaagtttgcttccttcattacacagtattccacggggcaggtcagcgtggagatcgagtgggagctgcagaaggagaacagcaaacgctggaaccccgagatccagtacacttccaactacaacaaatctgttaatgtggactttactgtggacactaatggtgtgtattcagagcctcgccccattggcaccagatacctgactcgtaatctgtaattgcttgttaatcaataaaccgtttaattcgtttcagttgaactttggtctccgcgtacttctttcttatctagtttccatggctacgtagataagtagcatggcgggttaatcattaactttaaggaacccctagtgatggagttggccactccctctctgcgcgctcgctcgctcactgaggccgggcgaccaaaggtcgcccgacgcccgggctttgcccgggcggcctcagtgagcgagcgagcgcgcagagagggagtggccaa

SEQ ID NO: 76 - DNA, 4678 bp, adeno-associated virus 2
ttggccactccctctctgcgcgctcgctcgctcactgaggccgggcgaccaaaggtcgcccgacgcccgggctttgcccgggcggcctcagtgagcgagcgagcgcgcagagagggagtggccaactccatcactaggggttcctggaggggtggagtcgtgacgtgaagtacgtcatagggttagggaggtcctatattagaggtcacgtgagtgttttgcgacattttgcgacatcatgtggtcacgctaggtatttaagcccgagtgagcacgcagggtctccattttgaagcgggaggtttgaacgcgcagccgccatgccggggttttacgagattgtgattaaggtccccagcgaccttgacgagcatcttcccggcatttctgacagctttgtgaactgggtggccgagaaggaatgggagttgccgccagattctgacatggatctgaatctgattgagcaggcacccctgaccgtggccgagaagctgcagcgcgactttctgacagaatggcgccgtgtgagtaaggccccggaggcccttttctttgtgcaatttgagaagggagagagctacttccacatgcacgtgctggtggaaaccaccggggtgaaatccatggttttgggacgtttcctgagtcagattcgcgaaaaactgattcagagaatttaccgcgggatcgagccgactttgccaaactggttcgcggtcacaaagacccgaaatggcgccggaggcgggaacaaggtggtggatgagtgctacatccccaattacctgctccccaaaacccagcctgagctccagtgggcgtggactaatatggaacagtatttaagcgcctgtttgaatctcgcggagcgtaaacggttggtggcgcagcatctgacgcacgtgtcgcagacgcaggagcagaacaaagagaatcagaatccaaattctgacgcgccggtgatcagatcaaaaacctcagccaggtacatggagctggtcgggtggctcgtggataaggggattacctctgagaagcagtggatccaggaggaccaggcctcctacatctccttcaatgcggcctccaactcgcggtcacagatcaaggctgctctggacaatgcgggaaagattatgagcctgactaaaacggcccccgactacctggtgggccagcagcccgtggaggacatttccggcaatcggatttataaaatcttggaactgaacgggtacgatccccaatacgcggcttccgtctttctgggatgggccacgaaaaagttcggcaagaggaacaccatctggctgtttgggcctgcaactaccgggaagacaaacatcgcggaggccatagcccacacggtgcccttctacgggtgcgtaaactggaccaatgagaactttcctttcaacgactgtgtcgacaagatggtgatctggtgggaggaggggaagatgaccgccaaggtcgtggagtcggccaaagccattcttggcggaagcaaggtgcgcgtggaccagaaatgcaagtcctcggcccagatagacccgactcctgtgattgtcacctccaacaccaacatgtgcgccgtgattgacgggaactcaacgaccttcgaacaccagcagccgttgcaagaccggatgttcaaatttgaactcacccgccgtctggatcatgactttgggaaggtcaccaaacaggaagtcaaagactttttccggtgggcaaaggatcacgtggttgaggtggagcatgaattctacgtcaaaaagggtggagctaagaaaaggcccgcccccagtgacgcagatataagtgagcccaaacgggcgcgcgagtcagttgcgcagccatctacgtcagacgcggaagcttcgatcaactacgcggacaggtaccaaaacaaatgttctcgtcacgtgggcatgaatctgatgctgtttccctgcagacaatgcgagagaatgaatcagaattcaaatatctgcttcactcacggacagaaagactgtttagagtgctttcccgtgtcagaatctcaacccgtttctgtcgtcaaaaaggcgtatcagaaactttgctacattcatcatatcatgggaaaggtgccagacgcttgcactgcctgcgatctggtcaatgtggatttggatgactgcatctctgaacaataaatgatttaaatcaggtatggctgccgatggttatcttccagattggctcgaggacactctctctgaaggaataagacagtggtggaagctcaaacctggcccaccaccaccaaagcccgcagagcggcataaggacgacagcaggggtcttgtgcttcctgggtacaagtacctcggacccttcaacggactcgacaagggggagccggtcaacgaggcagacgccgcggccctcgagcacgacaaggcctacgaccggcagctcgacagcggagacaacccgtacctcaaatacaaccacgccgacgcggagtttcaggagcgtcttaaagaagatacgtcttttgggggcaacctcggacgagcagtcttccaggcgaaaaagagggttcttgaacctctgggcctggttgaggagcctgttaagacggctccgggaaaaaagaggccggtagaacactctcctgcggagccagactcctcctcgggaaccggaaaagcgggcaaccagcctgcaagaaaaagattgaatttcggtcagactggagacgcagactccgtacctgacccccagcctctcggacagccaccagcagccccctctggtctgggaactaatacgatggctacaggcagtggcgcaccaatggcagacaataacgagggcgccgacggagtgggtaattcctcgggaaattggcattgcgattccacatggatgggcgacagagtcatcaccaccagcacccgaacctgggctctgcccacctacaacaaccatctgtacaagcagatttccagccaatcaggagcctcaaacgacaaccactactttggctacagcaccccttgggggtattttgacttcaacagattccactgccacttttcaccacgtgactggcaaagactcatcaacaacaactggggattccgaccaaagagactcaacttcaagctctttaacattcaagtcaaggaggtcacgcagaatgacggtacgacgacgattgccaataaccttaccagcacggttcaggtgtttactgactcggagtaccagctcccgtacgtcctcggctcggcgcatcaaggatgcctcccgccgttcccagcagacgtcttcatggtgccacagtatggatacctcaccctaaacaacgggagtcaagcagtaggacgctcttcattttactgcctggagtactttccttctcagatgcttcgtaccggaaacaactttaccttcagctatacctttgaggacgttcctttccacagcagctacgctcacagccagagtttggaccgcctcatgaatcctctcatcgaccagtacctgtattacttgagcagaacaaacactccaagcggaaccaccacgcagtccaggcttcagttttctcaggccggagcaagtgacattcgggaccagtctaggaactggcttcctggaccctgttaccgccagcagcgagtatcaaagacacctgcggataacaacaacagtgaatactcgtggactggagctaccaagtaccacctcaatggcagagactctctggtgaatccgggcccggccatggccagccacaaggacgatgaagaaaagttttttcctcaaagcggggttctcatctttgggaagcaaggctcagagaaaacaaatgtggacattgaaaaggtcatgattacagacgaagaggaaatcaggaccaccaatcccgtggctacggagcagtatggttctgtatctaccaacctccagagcggcaacacacaagcagctaccgcagatgtcaacacacaaggcgttcttccaggcatggtctggcaggacagagacgtgtacctgcaggggcccatttgggcaaaaattccacacacggatggacactttcacccttctcctcttatgggaggatttggacttaaacaccctcccccgcagattctcatcaaaaacaccccggtacctgcgaatccttcaaccaccttcagtgcagcaaagtttgcttccttcattacacagtactccacggggcaggtcagcgtggagatcgagtgggagctgcagaaggagaacagcaaacgctggaatcccgagattcaatacacttccaactacaacaaatctgttaatgtggactttactgtggacactaatggtgtgtattcagagcctcgccccattggcaccagatacctgactcgtaatctgtaattgcttgttaatcaataaaccgtgtaattcgtttcagttgaactttggtctctgcgtacttctttcttatctagtttccatgtctacgtagataagtagcatggcgggttaatcattaacacaaggaacccctagtgatggagttggccactccctctctgcgcgctcgctcgctcactgaggccgcccgggcaaagcccgggcgtcgggcgacctttggtcgggcggcctcagtgagcgagcgagcgcgcagagagggagtggccaa

SEQ ID NO: 77 - DNA, 4679 bp, adeno-associated virus 2
ttggccactccctctctgcgcgctcgctcgctcactgaggccgggcgaccaaaggtcgcccgacgcccgggctttgcccgggcggcctcagtgagcgagcgagcgcgcagagagggagtggccaactccatcactaggggttcctggaggggtggagtcgtgacgtgaagtacgtcatagggttagggaggtcctgtattagaggtcacgtgagtgctttgcgacattttgcgacactatgtggttacgcagggtatttaagcccgagtgagcacgcagggtctccattttgaagcgggaggtttgaacgcgcagccgccatgccggggttttacgagatcgtgattaaggtccccagcgaccttgacgagcatctgcccggcatttctgacagctttgtgaactgggtggccgagaaggaatgggagttgccgccagattctgacatggatctgaatctgattgagcaggcacccctgaccgtggccgagaaattgcagcgcgactttctgacggaatggcgccgtgtgagtaaggcccccgaggcccttttctttgtgcaatttgagaagggagagagctacttccacatgcacgtgctcgtggagaccacgggggtcaaatccatggttttgggacgtttcctgagtcaaattcgcgaaaaactgattcagagaatttaccgcgggatcgaaccgactttgccaaactggttcgcggtcacaaagacccgaaatggcgccggaggcgggaacaaggtggtggatgagtgctacatccccaattacctgctccccaaaacccaacctgagctccagtgggcgtggactaatatggaacagtatttaagcgcctgtttgaatctcgcggagcgtaaacggttggtggcgcagcatctgacgcacgtgtcgcagacccaggagcagaacaaagagaatcagaatcccaattctgacgcgccggtgatcagatcaaaaacatcagccaggtacatggagctggtcgggtggctcgtggataaggggattacctcggagaagcagtggattcaggaggaccaggcctcatacatctccttcaatgcggcctccaactcgcggtcccagatcaaggctgctctggacaatgcgggaaagatcatgagcctgactaaaacggcccccgactacctggtgggccagcagcccgtggaggacatttccagcaatcggatttataaaatcttggaactgaacgggtacgatccccaatatgcggcttccgtctttctgggatgggccacgaaaaagttcggcaagaggaacaccatctggctgtttggacctgcaactaccgggaagaccaacatcgcagaggccatagcccacacggttcccttctacgggtgcgtaaactggaccaatgagaactttcctttcaacgattgcgtcgacaagatggtgatctggtgggaggaggggaagatgaccgccaaggtcgtggagtcggccaaagccattctcggcggaagcaaggtgcgcgtggaccagaaatgcaagtcctcggcccagatagacccgactcccgtgatagtcacctccaacaccaacatgtgcgccgtgattgacgggaactccacgaccttcgaacaccagcagccgttgcaagaccggatgttcaaatttgaacttacccgccgtctggatcatgactttggaaaggtcaccaagcaggaagtgaaagactttttccggtgggcacaggataacgtggttgaggtggagcatgaattctacgtcaaaaagggtggagccaagaaaagacccgcccccagtgacgcagatataagtgagcccaaacgggcgcgcgagtcagttgcgcagccatcgacgtcagacgcggaagcttcaatcaactacgcggacaggtaccaaaacaaatgttctcgtcacgtgggcatgaatctgatgctgtttccctgcagacaatgcgagagaatgaatcagaattcaaatatctgcttcactcacggacagaaagactgtttagagtgctttcccgtgtcagaatctcaacccgtttctgtcgtcaaaaaggcgtatcagaaactttgctacattcatcatatcatgggaaaggtgccagacgcttgcactgcctgcgatctggtcaatgtggatttggatgactgcatctctgaacaataaatgatttaaatcaggtatggctgccgatggttatcttccagattggctcgaggacactctctctgaaggaataagacagtggtggaagctcaaacctggcccaccaccaccaaagcccgcagagcggcataaggacgacagcaggggtcttgtgcttcctgggtacaagtacctcggacccttcaacggactcgacaagggggagccggtcaacgaggcagacgccgcggccctcgagcacgacaaggcctacgaccggcagctcgacagcggagacaacccgtacctcaagtacaaccacgccgacgcggagtttcaggagcgtcttaaagaagatacgtcttttgggggcaacctcggacgagcagtcttccaggcgaaaaagagggttcttgaacctctgggcctggttgaggaacctgttaaaacggctccgggaaaaaagaggccggtagagcactctcctgcggagccagattcctcctccggaactggaaagtcgggcaaccagcctgcaagaaagagattgaatttcggtcagactggagacgcagactccgtacctgacccccagcctctcggacagccaccagcagccccctctggtctgggaactaatacgatggctacaggcagtggcgcaccaatggcagacaataacgagggcgccgacggagtgggtaattcctcgggaaattggcattgcgattccacatggatgggcgacagagtcatcaccaccagcacccgaacctgggctctgcccacctacaacaaccatctctacaagcagatttccagccagtctggagcctcaaacgacaaccactactttggctacagcaccccctgggggtattttgacttcaacagattccactgccacttttcaccacgtgactggcaaagactcatcaacaacaattggggattccggcccaaaagactcaacttcaagctgtttaacattcaagtcaaggaggtcacgcagaatgacggtacgacgacgattgccaataaccttaccagcacggttcaggtgtttactgactcggagtaccagctcccgtacgtcctcggctcggcgcatcaaggatgcctcccgccgttcccagcagacgtcttcatggtgccacagtatggatacctcaccctgaacaacgggagtcaggcagtaggacgctcttcattttactgcctagagtactttccttctcagatgctgcgtaccggaaacaactttaccttcagctacacctttgaggacgttcctttccacagcagctacgctcacagccagagtttggaccgtctcatgaatcctctcatcgaccagtacctgtattacttgagcagaacaaacactccaagcggaaccaccacgcagtccaggcttcagttttctcaggccggagcaagtgacattcgggaccagtctaggaactggcttcctggaccctgttaccgccagcagcgagtatcaaagacacctgcggataacaacaacagtgaatactcgtggactggagctaccaagtaccacctcaatggtagagactctctggtgaatccgggcccggccatggccagccacaaggacgatgaagaaaagttttttcctcagagcggggttctcatctttgggaagcaaggctcagagaaaacaaatgtggacattgaaaaggtcatgattacagacgaagaagaaatcaggaccaccaatcccgtggctacggagcagtatggttctgtatctaccaacctccagagcggcaacacacaagcagctaccgcagatgtcaacacacaaggcgttcttccaggcatggtctggcaggacagagacgtgtacctgcaggggcctatctgggcaaagattccacacacggacggacattttcacccctctcccctcatgggcggattcggacttaaacaccctcctccgcaaattctcatcaagaacaccccggtacctgcgaatccttcgaccaccttcagtgcggcaaagtttgcttccttcatcacacagtattccacggggcaggtcagcgtggagatcgagtgggagttgcagaaggagaacagcaaacgctggaaccctgagatccagtacacttccaactacaacaagtctgttaatgtggactttactgtggacactaatggtgtgtattcagagcctcgccccattggcaccagatacctgactcgtaatctgtaattgtttgttaatcaataaaccgtttaattcgtttcagttgaactttggtctctgcgtacttatttcttatctagttgccatggctacgtaaataagtagcatggcgggttaatcataaactctaaggaacccctagtgatggagttggccactccctctctgcgcgctcgctcgctcactgaggccgcccgaccaaaggtcgcccgacgcccgggctttgcccgggcggcctcagtgagcgagcgagcgcgcagagagggagtggccaa

SEQ ID NO: 78 - DNA, 4686 bp, adeno-associated virus 2
ttggccactccctctctgcgcgctcgctcgctcactgaggccgggcgaccaaaggtcgcccgacgcccgggctttgcccgggcggcctcagtgagcgagcgagcgcgcagagagggagtggccaactccatcactaggggttcctggaggggtggagtcgtgacgtgaagtacgtcatagggttagggaggtcctgtattagaggtcacgtgagtgttttgcgacattttgcgacaccatgtggttacgcagggtatttaagcccgagtgagcacgcagggtctccattttgaagcgggaggtttgaacgcgcagtcaccatgccgggattttacgagattgtgattaaggtccccagcgaccttgacgagcatttgcccggcatttctgacagctttgtgaactgggtggccgagaaggaatgggagttgccgccagattctgacatggatttgaatctgattgagcaggcacccctgaccgtggccgagaagctgcagcgcgactttctgacggagtggcgccgcgtgagtaaggccccggaggccctcttctttgtgcaatttgagaagggagagagctacttccacatgcacgtgctggtggagaccaccggggtgaaatccatggttttgggacgtttcctgagtcagattcgcgaaaaactgattcagagaatttaccgcgggatcgagccgactttgccaaactggttcgcggttacaaagacccgaaatggcgccggaggcgggaacaaggtggtggatgagtgctacatccccaattacctgctccccaaaacccagcctgagctccagtgggcgtggactaatatggaacagtatttaagcgcctgtttgaatctcgcggagcgtaaacggttggtggcgcagcatctgacgcacgtgtcgcagacgcaggagcagaacaaagagaatcagaatcccaattctgacgcgccggtgattagatcaaaaacctcagccagatacatggagctggtcgggtggctcgtggataaggggattacctcggagaagcagtggatccaggaggaccaggcctcatacatctccttcaatgcggcctccaactcgcggtcccagatcaaggctgctctggacaatgcgggaaagatcatgagcctcactaaaaccgcccccgactacctggtgggccagcagcccgtggaggacatttccagcaatcggatttataaaatcttggaactgaacgggtacgatccccaatacgcggcttccgtctttctgggatgggccacgaaaaagtttggcaagaggaacaccatctggctgtttgggcctgcaactaccgggaagaccaacatcgcggaggccatagcccacactgtgcccttctacgggtgcgtaaactggaccaatgagaactttcccttcaacgactgtgtcgacaagatggtgatctggtgggaggagggaaagatgaccgccaaggtcgtggagtcggccaaagccattctcggaggaagcaaggtgcgcgtggaccagaaatgcaagtcctcggcccagatagacccgactcccgtgatcgtcacctccaacaccaacatgtgcgccgtgattgacgggaactcaacgaccttcgagcaccagcagccgttgcaagaccggatgttcaaatttgaactcacccgccgtctggatcatgactttgggaaggtcaccaagcaggaagtcaaagactttttccggtgggcaaaggatcacgtggttgaggtggagcatgaattctacgtcaaaaagggtggagccaagaaaagacccgcccccagtgacgcagatataagtgagcccaaacgggcgcgcgagtcagttgcgcagccatcgacgtcagacgcggaagcttcgatcaactacgcggacaggtaccaaaacaaatgttctcgtcacgtgggcatgaatctgatgctgtttccgtgcaaaacctgcgagagaatgaatcagatttcaaatatctgtttcacgcacggtatcaaagactgtggggagtgctttcccgtgtcagaatctcaacccgtttctgtcgtcaaaaagaagacttatcagaaactgtgtccaattcatcacattttgggaagagcacccgagattgcgtgttcggcctgcgatctggccaatgtagacttggatgactgtgtttctgaacaataaatgacttaaaccaggtatggctgccgatggttatcttccagattggctcgaggacactctctctgaaggaataagacagtggtggaagctcaaacctggcccaccaccaccaaagcccgcagagcggcataaggacgacagcaggggtcttgtgcttcctgggtacaagtacctcggacccttcaacggactcgacaagggggagccggtcaacgaggcagacgccgcggccctcgagcacgacaaggcctacgaccggcagctcgacagcggagacaacccgtacctcaagtacaaccacgccgacgcggagtttcaggagcgtcttaaagaagatacgtcttttgggggcaacctcggacgagcagtcttccaggcgaaaaagagggttcttgaacctctgggcctggttgaggaacctgttaagacggctccgggaaaaaagaggccggtagagcactctcctgtggaaccagactcctcctcgggaaccggaaaagcgggccagcagcctgcaagaaaaagactgaatttcggtcagactggagacgcagactccgtacctgacccccagcctctcggacagccaccagcagccccctctggtctgggaactactacgatggctacaggcagtggcgcaccaatggcagacaataacgagggcgccgacggagtgggtaattcctcgggaaattggcattgcgattccacatggatgggcgacagagtcatcaccaccagcacccgaacctgggctctgcccacctacaacaaccatctgtacaagcagatttccagccaatcaggagcctcaaacgacaaccactactttggctacagcaccccttgggggtattttgacttcaacagattccactgccacttttcaccacgtgactggcaaagactcatcaacaacaattggggattccgacccaagagactcaacttcaagctctttaacattcaagtcaaagaggtcacgcagaatgacggtacgacgacgattgccaataaccttaccagcacggttcaggtgtttactgactcggagtaccagctcccgtacgtcctcggctcggcgcatcaaggatgcctcccgccgttcccagcagacgtcttcatggtgccacagtatggatacctcaccctgaacaacgggagtcaagcagtaggacgctcttcattttactgcctggagtactttccttctcagatgcttcgtaccggaaacaactttaccttcagctatacctttgaggacgttcctttccacagcagctacgctcacagccagagtttggaccgtctcatgaatcctctcatcgaccagtacctgtattacttgagcagaacaaacactccaagcggaaccaccacgcagtccaggcttcagttttctcaggccggagcgagtgacattcgggaccagtctaggaactggcttcctggaccctgttaccgccagcagcgagtatcaaagacagctgcggataacaacaacagtgaatactcgtggactggagctaccaagtaccacctcaatggcagagactctctggtgaatccgggcccggccatggccagccacaaggacgatgaagaaaagttttttcctcaaagcggggttctcatctttgggaagcaaggctcagagaaaacaaatgtggacattgaaaaggtcatgattacagacgaagaggaaatcaggaccaccaatcccgtggctacggagcagtatggttctgtatctaccaacctccagagcggcaacacacaagcagctaccgcagatgtcaacacacaaggcgttcttccaggcatggtctggcaggacagagacgtgtaccttcaggggcccatctgggcaaagattccacacacggacggacattttcacccctctcccctcatgggcggattcggacttaaacaccctcctccgcaaattctcatcaagaacaccccggtacctgcgaatccttcgaccaccttcagtgcggcaaagtttgcttccttcatcacacagtattccacgggacaggtcagcgtggagatcgagtgggagttgcagaaggagaacagcaaacgctggaatcccgagatccagtacacttccaactacaacaaatctgttaatgtggactttactgtggacactaatggcgtgtattcagagcctcgccccattggcaccagatacctgactcgtaatctgtaattgcttgttaatcaataaaccgtttaattcgtttcatttgaactttggtctctgcgtacttcttttcttatctagtttccatggctacgtaaataagtaccatggcgggttaatcattaactttaaggaacccctagtgatggagttggccactccctctctgcgcgctcgctcgctcactgaggccgcccgggcaaagcccgcccgacgcccgggctttgcccgggcggcctcagtgagcgagcgagcgcgcagagagggagtggccaa

SEQ ID NO: 79 - DNA, 4685 bp, adeno-associated virus 2
ttggccactccctctctgcgcgctcgctcgctcactgaggccgggcgaccaaaggtcgcccgacgcccgggctttgcccgggcggcctcagtgagcgagcgagcgcgcagagagggagtggccaactccatcactaggggttcctggaggggtggagtcgtgacgtgaagtacgtcatagggttagggaggtcctgtattagaggtcacgtgagtgttttgcgacattttgcgacaccatgtggttacggagggtatttaagcccgagtgagcacgcagggtctccattttgaagcgggaggtttgaacgcgcagccgccatgccggggttttacgagattgtgattaaggtccccagcgaccttgacgagcatctgcccggcatttctgacagctttgtgaactgggtggccgagaaggaatgggagttgccgccagattctgacatggatctgaatctgattgagcaggcacccctgaccgtggccgaaaagctgcagcgcgactttctgacagaatggcgccgtgtgagtaaggcccccgaggcccttttctttgtgcaatttgagaagggagaaagctacttccacatgcacgtgcttgtggaaaccacgggggtgaagtccatggttttgggacgtttcctgagtcagattcgcgaaaaactgattcagagaatttaccgcgggatcgagccgactttgccaaactggttcgcggtcacaaagacccgaaatggcgccggaggcgggaacaaggtggtggatgagtgctacatccccaattacctgctccccaaaacccagcctgagctccagtgggcgtggactaatatggaacagtatttaagcgcctgtttgaatctcgcggagcgtaaacggttggtggcgcagcatctgacgcacgtgtcgcagacccaggagcagaacaaagagaatcagaatcccaattctgacgcgccggtgattagatcaaaaacctcagccagatacatggagctggtcgggtggctcgtggataaggggattacctccgagaagcagtggatccaggaggaccaggcttcatacatctccttcaatgcggcctccaactcgcggtcccaaatcaaggctgctctggacaatgcgggaaagatcatgagcctgactaaaacggcccccgactacctggtgggccagcagcccgtggaggacatttccggcaatcggatttataaaatcttggaactgaacgggtatgatccccaatacgcggcttccgtctttctgggatgggccacgaaaaagttcggcaagaggaacaccatctggctgtttgggcctgcaactaccgggaagaccaacatcgcggaggccatagcccacacggtgcccttctacgggtgcgtaaactggaccaacgagaactttcctttcaatgattgcgtcgacaagatggtgatctggtgggaggaggggaagatgaccgccaaggtcgtggagtcggccaaagccattctcggaggaagcaaggtgcgcgtggaccagaaatgcaagtcctcggcccagatagacccgactcccgtgatcgtcacctccaacaccaacatgtgcgccgtgattgacgggaactcaacgacctttgagcaccagcagccgttgcaagaccggatgttcaaatttgaacttacccgccgtctggatcatgactttgggaaggtcacaaagcaggaagtcaaagactttttccggtgggcaaaggatcacgtggttgaggtggagcatgaattctacgtcaaaaagggtggagctaagaaaaggcccgcccccagtgacgcagatataagtgagcccaaacgggcgcgcgagtcagttgcgcagccatcgacgtcagacgcggaagcttcgatcaactacgcggacaggtaccaaaacaaatgttctcgtcacgtgggcatgaatctgatgctgtttccgtgcaaaacctgcgagagaatgaatcagatttcaaatgtctgtttcacgcacggtgtcaaagactgtggggagtgctttcccgtgtcagaatctcaacccgtttctgtcgtcaaaaagaagacttatcagaaactgtgtccaattcatcacattttgggaagagcacccgagattgcgtgttcggcctgcgatctggccaatgtggatttggatgactgtgtttctgaacaataaatgacttaaaccaggtatggctgccgatggttatcttccagattggctcgaggacactctctctgaaggaataagacagtggtggaagctcaaacctggcccaccaccaccaaagcccgcagagcggcataaggacgacaacaggggtcttgtgcttcctgggtacaagtacctcggacccttcaacggactcgacaagggggagccggtcaacgaggcagacgccgcggccctcgagcacgacaaggcctacgaccggcagctcgacagcggagacaatccgtacctcaagtacaaccacgccgacgcggagtttcaggagcgtcttaaagaagatacgtcttttgggggcaacctcggacgagcagtcttccaggcgaaaaagagggttcttgaacctctgggcctggttgaggaacctgttaaaacggctccgggaaaaaagaggccggtagagcactctcctgtggagccagactcctcctccggaactggaaagtcgggccaacagcctgcaagaaaaagattgaatttcggtcagactggagacgcagactccgtacctgacccccagcctctcggacagccaccagcagccccctctggtctgggaactaatacgatggctacaggcagtggcgcaccaatggcagacaataacgagggcgccgacggagtgggtaattcctcgggaaattggcattgcgattccacatggatgggcgacagagtcatcaccaccagcacccgaacctgggctctgcccacctacaacaaccatctgtacaagcagatttccagccaatcaggagcctcaaacgacaaccactactttggctacagcaccccttgggggtattttgacttcaacagattccactgccacttttcaccacgtgactggcaaagactcatcaacaacaattggggattccgacccaagagactcaacttcaagctctttaacattcaagtcaaggaggtcacgcagaatgacggtacgacgacgattgccaataaccttaccagcacggttcaggtgtttactgactcggagtaccagctcccgtacgtcctcggctcggcgcatcaaggatgcctcccgccgttcccagcagacgtcttcatggtgccacagtatggatacctcaccctaaacaacgggagtcaagcagtaggacgctcttccttttactgcctggagtactttccttctcagatgcttcgtaccggaaacaactttaccttcagctatacctttgaggacgttcctttccacagcagctacgctcacagccagagtttggaccgtctcatgaatcctctcatcgaccagtacctgtattacttgagcagaacaaacactccaagcggaaccaccacgcagtccaggcttcagttttctcaagccggagcaagtgacattcgggaccagtctaggaactggcttcctggaccctgttaccgccagcagcgagtatcaaagacacctgcggataacaacaacagtgaatactcgtggactggagctaccaagtaccacctcaatggcagagactctctggtaaatccgggcccggccatggccagccacaaggacgatgaagagaagtttttccctcaaagcggggttctcatctttgggaagcaaggctcagagaaaacaaatgtggacattgaaaaggtcatgattacagacgaagaggaaatcaggaccaccaatcccgtggctacggagcagtatggtactgtatctaccaacctccagagcggcaacacacaagcagctacctcagatgtcaacacacaaggcattcttccaggcatggtctggcaggacagagacgtgtacctgcagggacccatttgggcaaagattccacacacggacggacattttcacccctctcccctcatgggtggattcggacttaaacaccctcctccacagattctcatcaagaacaccccggtacctgcgaatccttcgaccaccttcagtgcggcaaagtttgcttccttcatcacacagtactccacggggcaggtcagcgtggagatcgagtgggagctgcagaaagagaacagcaaacgctggaaccccgagatccagtacacttccaattacaacaaatctgttaatgtggactttactgtggacactaatggtgtgtattcagagcctcgccccattggcaccagatacctgactcgtaatctgtaattgcttgttaatcaataaaccgtttaattcgtctcagttgaactttggtctctgcgtacttctttcttatctagtttccatggctacgtagataagtagcatggcgggttaatcattaactacaaggaacccctagtgatggagttggccactccctctctgcgcgctcgctcgctcactgaggccgggcgaccaaaggtcgcccgacgcccgggctttgcccgggcggcctcagtgagcgagcgagcgcgcagagagggagtggccaa

SEQ ID NO: 80 - DNA, 4666 bp, adeno-associated virus 2
ttggccactccctctctgcgcgctcgctcgctcactgaggccgggcgaccaaaggtcgcccgacgcccgggctttgcccgggcggcctcagtgagcgagcgagcgcgcagagagggagtggccaactccatcactaggggttcctggaggggtggagtcgtgacgtgaagtacgtcatagggttagggaggtcctgtattagaggtcacgtgagtgttttgcgacattttgcgacaccatgtggttacgcagggtatttaagcccgagtgagcacgcagggtctccattttgaagcgggaggtttgaacgcgcagccgccatgccggggttttacgagattgtgattaaggtccccagcgaccttgacgagcatctgcccggcatttctgacagctttgtgaactgggtggccgagaaggaatgggagttgccgccagattctgacatggatctgaatctgattgagcaggcacccctgaccgtggccgagaagctgcagcgcgactttctgacggagtggcgccgcgtgagtaaggccccggaggccctcttctttgtgcaatttgagaagggagagagctacttccacatgcacgtgctggtggaaaccaccggggtgaaatccatggttttgggacgtttcctgagtcagattcgcgaaaaactgattcagagaatttaccgcgggatcgagccgactttgccaaactggttcgcggtcacaaagaccagaaatggcgccggaggcgggaacaaggtggtggatgagtgctacatccccaattacctgctccccaaaacccagcctgaactccagtggactaatatggaacagtatttaagcgcctgtttgaatctcgcggagcgtaaacggttggtggcgcagcatctgacgcacgtgtcgcagacgcaggagcagaacaaagagaatcagaatcccaattctgacgcgccggtgattagatcaaaaacctcagccaggtacatggagctggtcgggtggctcgtggataaggggattacgtcggagaagcagtggatccaggaggaccaggcctcatacatctccttcaatgcggcctccaactcgcggtcccaaatcaaggctgctctggacaatgcgggaaagatcatgagcctgactaaaaccgcccccgactacctggtgggccagcagcccgtggaggacatttccagcaatcggatttataaaatcttggaactgaacgggtacgatccccaatacgcggcttccgtctttctgggatgggccacgaaaaagttcggcaagaggaacaccatctggctgtttgggcctgcaactaccgggaagaccaacatcgcggaggccatagcccacacggtgcccttctacgggtgcgtaaactggaccaatgagaactttcctttcaacgactgtgtcgacaagatggtgatctggtgggaggagggaaagatgaccgccaaggtcgtggagtcggccaaagccattctcggaggaagcaaggtgcgcgtggaccagaaatgcaagtcctcggcccagatagacccgactcccgtgatcgtcacctccaacaccaacatgtgcgccgtgattgacgggaactcaacgaccttcgaacaccagcagccgttgcaagaccggatgttcaaatttgaactcacccgccgcctggatcatgactttgggaaggtcaccaagcaggaagtcaaagactttttccggtgggcaaaggatcacgtggttgaggtggagcatgaattctacgtcaaaaagggtggagccaagaaaaggcccgcccccagtgacgcagatataagtgagcccaaacgggcgcgcgagtcagttgcgcagccatcgacgtcagacgcggaagcttcaatcaactacgcggacaggtaccaaaacaaatgttctcgtcacgtgggcatgaatctgatgctgtttccctgcagacaatgcgagagaatgaatcaaaattcaaatatctgcttcactcacggacagaaagactgtttagagtgctttcccgtgtcagaatctcaacccgtttctgtcgtcaaaaaggcgtatcagaaactgtgctacattcatcatatcatgggaaaggtgccagacgcttgcactgcctgcgatctggtcaatgtggatttggatgactgcatctctgaacaataaatgatttaaatcaggtatggctgccgatggttatcttccagattggctcgaggacactctctctgaaggaataagacagtggtggaagctcaaacctggcccaccaccaccaaagcccgcagagcggcataaggacgacagcaggggtcttgtgcttcctgggtacaagtacctcggacccttcaacggactcgacaagggagagccggtcaacgaggcagacgccgcggccctcgagcacgacaaggcctacgaccggcagctcgacagcggagacaacccgtacctcaagtacaaccacgccgacgcggagtttcaggagcgccttaaagaagatacgtcttttgggggcaacctcggacgagcagtcttccaggcgaaaaagagggttcttgaacctctgggcctggttgaggaacctgttaagacggctccgggaaaaaagaggccggtagagcactctcctgcggagccagactcctcctcgggaaccggaaaggcgggcaaccagcctgcaagaaaaagattgaatttcggtcagactggagacgcagactccgtacctgacccccaacctctcggacagccaccagcagccccctctggtctgggaactaatacgatggctacaggcagtggcgcaccaatggcagacaataacgagggcgccgacggagtgggtaattcctcgggaaattggcattgcgattccacatggatgggcgacagagtcatcaccaccagcacccgaacctgggctctgcccacctacaacaaccatctctacaagcagatttccagccagtctggagcctcaaacgacaaccactactttggctacagcaccccttgggggtattttgacttcaacagattccactgccacttttcaccacgtgactggcaaagactcatcaacaacaactggggattccgacccaagagactcaacttcaagctctttaacattcaagtcaaagaggtcacgcagaatgacggtacgacgacgattgccaataaccttaccagcacggttcaggtgtttactgactcggagtaccagctcccgtacgtcctcggctcggcgcatcaaggatgcctcccgccgttcccagcagacgtcttcatggtgccacagtatggatacctcaccctgaacaacggaagtcaggcagtaggacgctcttcattttactgcctggagtactttccttctcaaatgctgcgtaccggaaacaactttaccttcagctacacatttgaagacgtgcctttccacagcagctacgctcacagccagagtttggaccgtctcatgaatcctctcatcgaccagtacctgtattacttgagcagaacaaacactccaagcggaaccaccacgcagtccaggcttcagttttctcaggccggagcaagtgacattcgggaccagtctaggaactggcttcctggaccctgttaccgccagcagcgagtatcaaagacatctgcagataacaacaatagtgaatactcgtggactggagctaccaagtaccacctcaatggcagagactctctggtgaatccgggcccggccatggccagccacaaggacgatgaagaaaagttttttcctcagagcggggttctcatctttggaaagcaaggttcagagaaaacaaatgtggaaaaggtcatgattacagacgaagaggaaatcaggaccaccaatcccgtggctacggagcagtatggtgctgtatctaccaacctccagagcggcaacacacaagcagctaccgcagatgtcaacacacaaggcgttcttccaggcatggtctggcaggacagagacgtgtacctgcaggggcccatctgggcaaagattccccacacggatggacactttcacccttctcctcttatgggaggatttggacttaaacaccctcccccgcagattctcatcaagaacaccccggtacctgcgaatccttcgaccacctttagtgcggcaaagtttgcttccttcatcacacagtattccacggggcaggtcagtgtggagatcgagtgggagctgcagaaggagaacagcaagcgctggaaccccgagatccaatacacttccaactacaacaaatctgttaatgtggactttactgtggacactaatggcgtgtattcagagcctcgccccattggcaccagatacctgactcgtaatctgtaattgcttgttaatcaataaaccgtttaattcgtttcaattgaactttggtctctgcgtacttctttcttatatagtttccatggctacgtagataagtagcatggcgggttaatcattaacacaaggaacccctagtgatggagttggccactccctctctgcgcgctcgctcgctcactgaggccgggcgaccaaaggtcgcccgacgcccgggctttgcccgggcggcctcagtgagcgagcgagcgcgcagagagggagtggccaa

SEQ ID NO: 81 - DNA, 4679 bp, adeno-associated virus 2
ttggccactccctctctgcgcgctcgctcgctcactgaggccgggcgaccaaaggtcgcccgacgcccgggctttgcccgggcggcctcagtgagcgagcgagcgcgcagagagggagtggccaactccatcactaggggttcctggaggggtggagtcgtgacgtgaagtacgtcatagggttagggaggtcctgtattagaggtcacgtgagtgttttgcgacattttgcgacaccatgtggtcacgctgggtatttaagcccgagtgagcacgcagggtctccattttgaagcgggaggtttgaacgcgcagccgccatgggcaaagtttacgagattgtgattaaggtccccagcgaccttgacgagcatctgccaggcatttctgacagctttgtgaactgggtggccgagaaggaatgggagttgccgccagattctgacatggatctgaatctgattgagcaggcacccctgaccgtggccgagaagctgcagcgcgactttctgacggagtggcgccgcgtgagtaaggccccggaggcccttttctttgtgcaatttgagaagggagagagctacttccacatgcacgtgctggtggataccaccggggtgaaatccatggttttgggacgtttcctgagtcagattcgcgaaaaactgattcagagaatttaccgcgggatcgagccgactttgccaaactggttcgcggtcacaaagacccgaaatggcgccggaggcgggaacaaagttgtggatgagtgctacatccccgattacctgctccccaaaacccagcctgagctccagtgggcgtggactaatatggaacagtatttaagcgcctgtttgaatctcgcggagcgtaaacggttggtggcgcagcatctgacgcacgtgtcgcagacgcaggagcagaacaaagagaatcagaatcctaattctgacgcgccggtgatcagatcaaaaccctcagccaggtacatggagctggtcgggtggctcgtggataaggggattacgtcggagaagcagtggatccaggaggaccaggcctcctacatctccttcaatgcggcctccacctcgcggtcccaaatcaaggctgccttggacaatgcggggaagatcatgagcctgactaaaactgcccccgactacctggtgggccagcagcccgtggaggacatttccagcaatcggatttataaaatcttggaactgaacgggtacgatccccaatacgcggcttccgtctttctgggatgggccacgaaaaagtttggcaagaggaacaccatctggctgtttgggcctgcaactaccgggaagaccaacatcgcggaggccatagcccacactgtgcccttctacgggtgcgtaaactggaccaatgagaactttcctttcaacgactgtgtcgacaagatggtgatctggtgggaggaggggaagatgaccgccaaggtcgtggagtcggccaaagccattctcggaggaagtaaggtgcgcgtggaccagaaatgcaagtcctcggcccagatagacccgactcctgtgatcgtcacctccaacaccaacatgtgcgccgtgattgacgggaactcaacgaccttcgagcaccagcagccgttgcaagaccggatgttcaaatttgaactcacccgccgtctggatcatgactttgggaaggtcaccaagcaggaagtcaaagactttttccggtgggcaaaggatcacgtggttgaggtggagcatgaattctacgtcaaaaagggtggagccaagaaaagacccgcccccagtgacgcagatataagtgagcccaaacgggcgcgcgagtcagttgcgcagccatcgacgtcagacgcggaagcttcgatcaactacgcggacaggtatcaaaacaaatgttctcgtcacgtgggcatgaatctgatgctgtttccctgcagacaatgcgagagaatgaatcagaattcaaatatctgcttcactcacggacagaaagactgtttagagtgctttcccgtgtcagaatctcaacccgtttctgtcgtcaaaaaggcgtatcagaaactgtgctacattcatcatatcatgggaaaggtaccagacgcttgcactgcctgcgatctggtcaatgtggatttggatgactgcatctctgaacaataaatgatttaaatcaggtatggctgccgatggttatcttccagattggctcgaggacactctctctgaaggaataagacagtggtggaagctcaaacctggcccaccaccaccaaagcccgcagagcggcataaggacgacagcaggggtcttgtgcttcctgggtacaagtacctcggacccttcaacggactcgacaagggagagccggtcaacgaggcagacgccgcggccctcgagcacgacaaggcctacgaccggcagctcgacagcggagacaacccgtacctcaagtacaaccacgccgacgcggagtttcaggagcgccttaaagaagatacgtcttttgggggcaacctcggacgagcagtcttccaggcgaaaaagagggttcttgaacctctgggcctggttgaggagcctgttaaaacggctccgggaaaaaagaggccggtagagcactctcctgtggagccagactcctcctcgggaaccggaaaggcgggcaaccagcctgcaagaaaaagattgaatttcggtcagactggagacgcagactccgtacctgacccccagcctctcggacagccaccagcagccccctctggtctgggaactaatacgatggctacaggcagtggcgcaccaatggcagacaataacgagggcgccgacggagtgggtaattcctcgggaaattggcattgcgattccacatggatgggcgacagagtcatcaccaccagcacccgaacctgggccctgcccacctacaacaaccacctctacaaacaaatttccagccaatcaggagcctcgaacgacaaccactactttggctacagcaccccctgggggtattttgacttcaacagattccactgccacttttcaccacgtgactggcaaagactcatcaacaacaactggggattccggcccaagagactcaacttcaagctctttaacattcaagtcaaagaggtcacgcagaatgacggtacgacgacgattgccaataaccttaccagcacggttcaggtgtttactgactcggagtaccagctcccgtacgtcctcggctcggcgcatcaaggatgcctcccgccgttcccagcagacgtcttcatggtcccacagtatggatacctcaccctgaacaacgggagtcaggcagtaggacgctcttcattttactgcctggagtactttccttctcagatgctgcgtaccggaaacaactttaccttcagctatacctttgaggatgttccgttcacaagcagatacgctcacagccagagtttggaccgtctcatgaatcctctcatcgaccagtacctgtattacttgagcagaacaaacactccaagtggaaccaccacgcagtcaaggcttcagttttctcaggccggagcgagtgacattcgggatcagtctaggaactggcttcctggaccctgttatcgccagcagcgagtatcaaagacatctgcggataacaacaacagtgaatactcgtggactggagctaccaagtaccacctcaatggcagagactctctggtgaatccgggcccggccatggccagtcacaaagacgatgaagaaaagttttttcctcagagcggggttctcatctttgggaagcaaggctcagagaaaacaaatgtggacattgaaaaggtcatgattacagacggagaggaaatcaggaccaccaatcccgtcgccacggagcagtatggttctgtatctaccaacctccagagaggcaacacacaagcagctaccgcagatgtcaacacacaaggcgttcttccaggcatggtctggcaggacagagacgtgtacctgcaggggcctatctgggcaaagattccacacacggacggacattttcacccctctcccctcatgggcggatttggacttaaacaccctcccccgcagattctcatcaagaacaccccggtacctgcgaatccttcgaccaccttcagtgcggcaaagtttgcttcctttatcacacagtactccacggggcaggtcagcgtggagatcgagtgggagctgcagaaggagaacagcaaacgctggaatcccgagattcagtacacttccaactacaacaagtctgttaatgtggactttactgtggacactaatggtgtgtattcagagcctcgccccattggcaccagatacctgactcgtaatctgtaattgcttgttaatcaataaaccgtgtaattcgtttcagttgaactttggtctctgcgtacttctttcttatctagtttccatggctacgtagataagtaccatggcgggttaatcattaactataaggaacccctagtgatggagttggccactccctctctgcgcgctcgctcgctcactgaggccgggcgaccaaaggtcgcccgacgcccgggctttgcccgggcggcctcagtgagcgagcgagcgcgcagagagggagtggccaa

SEQ ID NO: 82 - DNA, 4679 bp, adeno-associated virus 2
ttggccactccctctctgcgcgctcgctcgctcactgaggccgggcgaccaaaggtcgcccgacgcccgggcttggctcgggcggcctcagtgagcgagcgagcgcgcagagagggagtggccaactccatcactaggggttcctggaggggtggagtcgtgacgtgaagtacgtcataggattagggaggtcctgtattagaggtcacgtgagtgttttgcgacattttgcgacaccatgtggtcacgctgggtatttaagcccgagtgagcacgcagggtctccattttgaagcgggaggtttgaacgcgcagccgccatgccggggttttacgagattgtgattaaggtccccagcgaccttgacgagcatctgcccggcatttctgacagctttgtgaactgggtggccgagaaggaatgggagttgccgccagattctgacatggatttgaatctgattgagcaggcacccctgaccgtggccgagaagctgcagcgcgactttctgacggaatggcgccgcgtgagtaaggccccggaggccctcttctttgtgcaatttgaaaagggagagagctacttccacatgcacgtgctggtggagaccaccggggtgaaatccatggttttgggacgtttcctgagtcagattcgcgaaaaactgattcagagaatttaccgcgggatcgagccgactttgccaaactggttcgcggtcacaaagacccgaaatggcgccggaggcgggaacaaggtggtggatgagtgctacatccccaattacctgctccccaaaacccagcctgagctccagtgggcgtggactaatatggaacagtatttaagcgcctgtttgaatctcgcggagcgtaaaaggttggtggcgcagcatctgacgcacgtgtcgcagacgcaggagcagaacaaagagaatcagaatcccaattctgacgcgccggtgattagatcaaaaacctcagccagatacatggagctggtcgggtggctcgtggataaggggattacctcggagaagcagtggatccaggaggaccaggcctcatacatctccttcaatgcggcctccaactcgcggtcccaaatcaaggctgctctggacaatgcgggaaagatcatgagcctgactaaaaccgcccccgactacctggtgggccagcagcccgtggaggacatttccagcaatcggatttataaaatcttggaactgaacgggtacgatccccaatacgcggcttccgtatttctgggatgggccacgaaaaagttcggcaagagaaacaccatctggctgtttgggcctgcaactaccgggaagaccaacatcgcggaggctatagcccacactgtgcccttctacgggtgcgtaaactggaccaatgagaactttcctttcaacgactgtgtcgacaagatggtgatctggtgggaggaggggaagatgaccgccaaggtcgtggagtcggccaaagccattctcggaggaagcaaggtgcgcgtggaccagaaatgcaagtcctcggcccaaatagacccgactcccgtgatcgtcacctccaacaccaacatgtgcgccgtgattgacgggaactcaacgaccttcgaacaccagcagccgttgcaagaccggatgttcaaatttgaactcacccgccgtctggatcatgactttgggaaggtcaccaagcaggaagtcaaagactttttccggtgggcaaaggatcacgtggttgaggtggagcatgaattctacgtcaaaaagggtggagccaagaaaaggcccgcccccagtgacgcagatataagtgagcccaaacgggcgcgcgagtcagttgcgcagccatcgacgtcagacgcggaagcttcgatcaactacgcggacaggtaccaaaacaaatgttctcgtcacgtgggcatgaatctgatgctgtttccctgcagacaatgcgagagaatgaatcaaaattcaaatatttgtttcactcacggacagaaagactgtttggagtgctttcccgtgtcagaatctcaacccgtttctgtcgtcaaaaaggcgtatcagaaactgtgctatattcatcatatcatgggaaaggtaccagacgcttgcactgcttgcgacctggtcaatgtggatttggatgactgcatctctgaacaataaatgatttaaatcaggtatggctgccgatggttatcttccagattggctcgaggacactctctctgaaggaataagacagtggtggaagctcaaacctggcccaccaccaccaaagcccgcagagcggcataaggacgacagcaggggtcttgtgcttcctgggtacaagtacctcggacccttcaacggactcgacaagggggagccggtcaacgaggcagacgccgcggccctcgagcacgacaaggcctacgaccggcagctcgacagcggagacaacccgtacctcaagtacaaccacgccgacgcggagtttcaggagcgccttaaagaagatacgtcttttgggggaaacctcggacgagcagtcttccaggcgaaaaagagggttcttgaacctctgggcctggttgaggagcctgttaaaacggctccgggaaaaaagaggccggtagagcactctcctgtggagccagactcctcctcgggaaccggaaaagcgggccagcagcctgcgagaaagagattgaatttcggtcagactggagacgcagactccgtacctgacccccagcctctcggacagccaccagcagccccctctggtctgggaactaatacgatggctacaggcagtggcgcaccaatggcagacaataacgagggcgccgacggagtgggtaattcctcgggaaattggcattgcgattccacatggatgggcgacagagtcatcaccaccagcacccgcacctgggctctgcccacctacaacaaccatctgtacaagcagatttccagccaatcaggagcatcgaacgacaaccactactttggctacagcaccccctgggggtattttgacttcaacagattccactgccatttctccccacgtgactggcaaagactcatcaacaacaattggggattccgacccaagagactcaacttcaagctctttaacattcaagtcaaggaggtcacgcagaatgacggtacgacgacgattgccaataaccttaccagcacggttcaggtgtttactgactcggagtaccagctcccgtacgtcctcggctcggcgcatcaaggatgcctcccgccgtttccagcggacgtcttcatggtcccacagtatggatacctcaccctgaacaacgggagtcaggcggtaggacgctcttccttttactgcctggagtactttccttctcagatgctgcgtaccggaaacaactttaccttcagctacacctttgaggacgttcctttccacagcagctacgctcacagccagagtttggaccggctgatgaatcctctgatcgaccagtatctgtattacttgagcaaaacaaacgctccaagcggaaccaccacgatgtccaggcttcagttttctcaggcaggagcaagtgacattcgggaccagtctagaaactggcttcctggaccctgttaccgccagcagcgagtatcaaagacagctgcggacaacaacaacagtgattactcgtggactggagctaccaagtaccacctcaatggaagagactctctggtgaatccgggcacagccatggccagccacaaggacgatgaagaaaagtattttcctcagagcggggttctcatcttcggaaaacaagattcgggaaaaactaatgtggacattgaaaaggtcatgattacagacgaagaggaaatcaggaccaccaatcccgtggctacggagcagtatggttctgtatctaccaacctccaaagcggcaacacacaagcagctacctcagatgtcaacacacaaggcgttcttccaggcatggtctggcaggacagagacgtgtacctgcagggacccatctgggcaaagattccacacacggacggacattttcacccttctcctcttatgggaggatttggactgaagcacccccccccgcagattctcatcaagaataccccggtacctgcgaatccttctaccaccttcagcgcggcaaagtttgcttccttcatcacacagtactccacggggcaggtcagcgtggagatcgagtgggagctgcagaaagagaacagcaaacgctggaaccccgagatccagtacacttccaactacaacaagtctgttaatgtggactttactgtggacactaatggtgtgtattcagagcctcgccccattggcaccagatacctgactcgtaatctgtaattgcttgttaatcaataaaccgtttaattcgtttcagttgaactttggtctctgcgtacttctttcttatctagtttccatggctacgtagataagtagcctggcgggttaatcattaactacaaggaacccctagtgatggagttggccactccctctctgcgcgctcgctcgctcactgaggccgggcgaccaaaggtcgcccgacgcccgggctttgcccgggcggcctcagtgagcgagcgagcgcgcagagagggagtggccaa

SEQ ID NO: 83 - DNA, 4679 bp, adeno-associated virus 2
ttggccactccctctctgcgcgctcgctcgctcactgaggccgggcgaccaaaggtcgcccgacgcccgggctttgcccgggcggcctcagtgagcgagcgagcgcgcagagagggagtggccaactccatcactaggggttcctggaggggtggagtcgtgacgtgaagtacgtcatagggttagggaggtcctgtattagaggtcacgtgagtgttttgcgacattttgcgacaccatgtggtcacgctgggtatataagcccgagtgagcacgcagggtctccattttgaagcgggaggtttgaacgcgcagccgccatgccggggttttacgagattgtgattaaggtccccagcgaccttgacgagcatctgcccggcatttctgacagctttgtaaactgggtggccgagaaggaatgggagttgccgccagattctgacatggatctgaatctgattgagcaggcacccctgaccgtggccgaaaagctgcagcgcgactttctgacggagtggcgccgtgtgagtaaggctccggaagcccttttctttgtgcaatttgagaaaggggagagctacttccacatgcacgtgcttgtggagaccaccggggtgaaatccatggtcttgggacgtttcctgagtcagattcgcgaaaaactgattcagagaatttaccgcgggatcgagccgactttgccaaattggttcgcggtcacaaagacccgaaatggcgccggaggcgggaacaaggtggtggatgagtgctatatccccaattacctgctccccaaaacccagcctgagctccagtgggcgtggactaatatggaacagtatttaagcgcctgtttgaatctcgcggagcgtaaacggttggtggcgcagcatctgacgcacgtgtcgcagacgcaggagcagaacaaagagaatcagaatcccaattctgacgcgccggtgatcagatcaaaaacctcagccaggtacatggagctggtcgggtggctcgtggataaggggattacctcggagaagcagtggatccaggaggaccaggcttcatacatctccttcaatgcggcctccaactcgcggtcccaaatcaaggctgctttggacaatgcgggaaagatcatgagcctcactaaaaccgcccccgactacctggtgggccaacagcccgtggaggacatttccagcaatcggatttataaaatcttggaactgaacgggtatgatccccaatatgcggcttccgtcttcctgggatgggccacgaaaaggttcggcaagaggaacaccatctggctgtttgggcctgcgactaccgggaagaccaacatcgcggaggctatagcccacactgtgcctttttacgggtgcgtaaactggaccaatgagaactttccgttcaacgactgcgtcgacaagatggtgatctggtgggaggaggggaagatgaccgccaaggttgtggagtcggccaaggccatcctcggtgggagcaaggtgcgcgtggaccagaaatgcaagtcctcggcccagatagacccgactcctgtgatcgtcacctccaacaccaacatgtgcgccgtgattgacgggaactcaacgaccttcgagcaccagcagccgttgcaagaccggatgttcaaatttgaactcacccgccgtctggatcatgactttgggaaggtcaccaagcaggaagttaaagactttttccggtgggcccaagaccacgtggtagaggtggagcatgaattctacgtcaaaaagggtggagctaagaaaaggcccgcccccagtgacgcagatataagtgagcccaaacgggcgcgcgagtcagttgcgcagccatcgacgtcagacgcggaagcttcgatcaactacgcggacaggtaccaaaacaaatgttctcgtcacgtgggcatgaatctgatgctgtttccctgcagacaatgcgagagaatgaatcagaattcaaatatctgcttcactcacggacaaaaagactgcctagagtgctttcccgtgtcagaatctcaacccgtttctgtcgtcaaaaaggcgtatcagaaactgtgctatattcatcatatcatgggaaaggtaccagatgcttgcactgcttgcgacctggtcaatgtggatttggatgactgcatctctgaacaataaatgatttaaatcaggtatggctgccgatggttatcttccagattggctcgaggacactctctctgaaggaataagacagtggtggaagctcaaacctggcccaccaccaccaaagcccgcagagcggcacaaggacgacagcaggggtcttgtgcttcctgggtacaagtacctcggacccttcaacggactcgacaaaggagagccggtcaacgaggcagacgccgcggccctcgagcacgacaaggcctacgaccggcagctcgacagcggagacaacccgtacctcaagtacaaccacgccgacgcggagtttcaggagcgtcttaaagaagatacgtcttttgggggcaacctcggacgagcagtcttccaggcgaaaaagagggttcttgaacctctgggcctggttgaggagcctgttaaaacggctccgggaaaaaagaggccggtagagcactctcctgtggagccagactcctcctcgggaaccggaaaagcgggccagcagcctgcgagaaagagattgaatttcggtcagactggagacgcagactccgtacctgacccccagcctctcggacagccaccagcagccccctctggtctgggaactaatacgatggctacaggcagtggcgcaccaatggcagacaataacgagggcgccgacggagtgggtaattcctcgggaaattggcattgcgattccacatggatgggcgacagagtcatcaccaccagcacccgcacctgggctctgcccacctacaacaaccatctgtacaagcagatttccagccaatcaggagcatcgaacgacaaccactactttggctacagcaccccttgggggtattttgacttcaacagattccactgccacttctccccacgtgactggcaaagactcatcaacaacaattggggattccggcccaaaagactcaacttcaagctctttaacattcaagtcaaggaggtcacgcagaatgacggtacgacgacgattgccaataaccttaccagcacggttcaggtgtttactgactcggagtaccagctcccgtacgtcctcggctcggcgcatcaaggatgcctcccgccgtttccagcggacgtcttcatggtcccacagtatggatacctcaccctgaacaacgggagtcaggcggtaggacgctcttccttttactgcctggagtactttccttctcagatgctgcgtaccggaaacaactttaccttcagctacacctttgaggacgttcctttccacagcagctacgctcacagccagagtttggaccggctgatgaatcctctgatcgaccagtatctgtattacttgagcaaaacaaacgctccaagcggaaccaccacgatgtctaggcttcagttttctcaggccggagcaagtgacattcgggaccagtctagaaactggcttcctggaccctgttaccgccagcagcgagtatcaaagacagctgcggacaacaacaacagtgattactcgtggactggagctaccaagtaccacctcaatggaagagactctctggtgaatccgggcacagccatggccagccacaaggacgatgaagaaaagtattttcctcagagcggggttctcatcttcggaaaacaagactcgggaaaaactaatgtggacattgaaaaggtcatgattacagacgaagaggaaatcaggaccaccaatcccgtggctacggagcagtatggttctgtatctaccaacctccaaagcggcaacacacaagcagctacctcagatgtcaacacacaaggcgttctttcaggcatggtctggcaggacagagacgtgtacctgcaggggcccatctgggcaaagattccccacacggatggacactttcacccttccccgctcatgggaggatttggacttaaacaccctcccccgcagattctcatcaagaatacccccgtacctgcgaatccttcgaccaccttcagtgcggcaaagtttgcttccttcatcacacagtattccacggggcaggtcagcgtggagatcgagtgggagctgcagaaagagaacagcaaacgctggaaccccgagatccagtacacttccaactacaacaagtctgttaatgtggactttactgtggacactaatggtgtgtattcagagcctcgccccattggcaccagatacctgactcgtaatctgtaattgcttgttaatcaataaaccgtttaattcgtttcagttgaactttggtctctgcgtacttctttcttatctagtttccatggctacgtagataagtagcctggcgggttaatcattaactacaaggaacccctagtgatggagttggccactccctctctgcgagcgagctcgctcactgaggccgggcgaccaaaggtcgcccgacgcccgggctttgcccgggcggcctcagtgagcgagcgagcgcgcagagagggagtggccaa

SEQ ID NO: 84 - DNA, 4679 bp, adeno-associated virus 2
ttggccactccctctctgcgcgctcgctcgctcactgaggccgggcgaccaaaggtcgcccgacgcccgggctttgcccgggcggcctcagtgagcgagcgagcgcgcagagagggagtggccaactccatcactaggggttcctggaggggtggagtcgtgacgtgaagtacgtcatagggttagggaggtcctgtattagaggtcacgtgagtgttttgcgacattttgcgacaccatgtggttacgcagggtatttaagcccgagtgagcacgcagggtctccattttgaagcgggaggtttgaacgcgcagccgccatgccggggttttacgagattgtgattaaggtccccagcgaccttgacgagcatctgccgggcatttctgacagctttgtgaactgggtggccgagaaggaatgggagttgccgccagattctgacatggatctgaatctgattgagcaggcacccctgaccgtggccgagaagctgcagcgcgactttctgacggagtggcgccgcgtgagtaaggccccggaggccctcttctttgtgcaatttgagaagggagagagctacttccacatgcacgtgcttgtggagaccaccggggtgaagtccatggttttgggacgtttcctgagtcagattcgcgaaaaactgattcagagaatttaccgcgggatcgagccgactttgccaaactggttcgcggtcacaaagacccgaaatggcgccggaggcgggaacaaggtggtggatgagtgctacatccccaattacctgctccccaaaacccagcctgagctccagtgggcgtggactaatatggaacagtatttaagcgcctgtttgaatctcgcggagcgtaaacggttggtggcgcagcatctgacgcacgtgtcgcagacgcaggagcagaacaaagagaatcagaatcccaattctgacgcgccggtgatcagatcaaaaacctcagccaggtacatggagctggtcgggtggctcgtggataaggggattacctcggagaagcagtggatccaggaggaccaggcctcatacatctccttcaatgcggcctccaactcgcggtcccagatcaaggctgccttggacaatgcgggaaaaatcatgagcctgactaaaaccgcccccgactacctggtgggccagcagcccgtggaggacatttccagcaatcggatttataaaatcttggaactgaacgggtacgatccccaatacgcggcttccgtctttctgggatgggccacgaaaaagttcggcaagaggaacaccatctggctgtttgggcctgcaactaccgggaagaccaacatcgcggaggccatagcccacacggttcccttctacgggtgcgtaaactggaccaatgagaactttcccttcaatgactgcgtcgacaagatggtgatctggtgggaggagggaaaaatgaccgccaaggtcgtggaatcggccaaagccattctcggcggaagcaaggtgcgcgtggaccagaaatgcaaatcctcggcccagatagacccgactcccgtgatcgtcacctccaacaccaacatgtgcgccgtgattgacggaaactcaacgaccttcgagcaccagcagccgttgcaagaccggatgttcaaatttgaactcacccgccgtctggatcatgactttgggaaggtcaccaagcaggaagtcaaagactttttccggtgggcaaaggatcacgtggttgaggtggagcatgaattctacgtcaaaaagggtggagctaagaaaaggcccgcccccagtgacgcagatataagtgagcccaaacgggcgcgcgagtcagttgcgcagccatcgacgtcagacgcggaagcttcgatcaactacgcggacaggtaccaaaacaaatgttctcgtcacgtgggcatgaatttgatgctgtttccctgcagacaatgcgagagaatgaatcagaattcgaatatctgcttcactcacggacagaaagactgtttagagtgctttcccgtgtcagaatctcaacccgtttctgtcgtcaaaaaggcgtatcagaaactgtgctacattcatcatatcatgggaaaggtgccagacgcttgcactgcctgcgatatggtcaatgtggatttggatgactgcatctctgaacaataaatgatttaaatcaggtatggctgccgatggttatcttccagattggctcgaggacactctctctgaaggaataagacagtggtggaagctcaaacctggcccaccaccaccaaagcccgcagagcggcacaaggacgacagcaggggtcttgtgcttcctgggtacaagtacctcggacccttcaacggactcgacaagggagagccggtcaacgaggcagacgccgcggccctcgagcacgacaaggcctacgaccggcagctcgacagcggagacaacccgtacctcaagtacaaccacgccgacgcggagtttcaggagcgtcttaaagaagatacgtcttttgggggcaacctcggacgagcagtcttccaggcgaaaaagagggttcttgaacctctgggcctggttgaggaacctgttaagacggctccgggaaaaaagaggccggtagagcactctcctgcggagccagattcctcctccggaactggaaagtcgggccaacagcctgcaagaaagagattgaattttggtcagactggagacgcagactccgtacctgacccccagcctctcggacagccaccagcagccccctctggtctgggaactaatacgatggctacaggcagtggcgcaccaatggcagacaataacgagggcgccgacggagtgggtaattcctcgggaaattggcattgcgattccacatggatgggcgacagagtcatcaccaccagcacccgcacctgggctctgcccacctacaacaaccatctgtacaagcagatttccagccagtctggagccagcaacgacaaccactactttggctacagcaccccctgggggtattttgacttcaacagattccactgccacttctccccacgtgactggcaaagactcatcaacaacaactggggattccggcccaagagactcagcttcaagctctttaacattcaagtcaaggaggtcacgcagaatgacggtacgacgacgattgccaataaccttaccagcacggttcaggtgtttactgactcggagtaccagctcccgtacgtcctcggctcggcgcatcaaggatgcctcccgccgttcccagcagacgtcttcatggtgccacagtatggatacctcaccctgaacaacgggagtcaggcggtaggacgctcttcattttactgcctggagtactttccttctcagatgctgcgtactggaaacaactttaccttcagctacacctttgaggacgttcctttccacagcagctacgctcacagccagagtttggaccgtctcatgaatcctctcatcgaccagtacctgtattacttgagcagaacaaacactccaagcggaaccaccacgatgtccaggcttcagttttctcaggccggagcgagtgacattcgggaccagtctaggaactggcttcctggaccctgttaccgccagcagcgagtatcaaagacagctgcggacaacaacaacagtgattactcgtggactggagctaccaagtaccacctcaatggccgggactctctggtgaatccaggaccagccatggccagccacaaagacgatgaagaaaagtattttcctcagagcggggttctcatctttggaaaacaagactcgggaaaaactaatgtggacattgaaaaggttatgattacagacgaagaggaaatcaggaccaccaatcccgtggctacggagcagtatggttctgtatctaccaacctccagagcggcaacacacaagcagctacctcagatgtcaacacacaaggcgttcttcctggcatggtctggcaggacagagacgtgtacctgcagggacccatctgggcaaagattccacacacggacggacactttcacccttctcccctcatgggcggatttggactgaagcaccctcccccgcagattctcatcaagaataccccggtacctgcgaatccttcgaccaccttcagtgcggcaaagtttgcttccttcatcacacagtactccacggggcaggtcagcgtggagatagagtgggagctgcagaaggagaacagcaaacgctggaaccccgagatccagtatacttccaactacaacaaatctgttaatgtggactttactgtggacactaatggtgtgtattcagagcctcgccccattggcaccagatacctgactcgtaatctgtaattgcttgttaatcaataaaccgttaaattcgtttcagttgaactttggtctctgcgtacttctttcttatctagtttccatggctacgtagataagtagcatggcgagttaatcattaactctaaggaacccctagtgatggagttggccactccctctctgcgcgctcgctcgctcactgaggccgcccgggcaaagcccgggcgtcgggcgacctttggtcgcccggcctcagtgagcgagcgagcgcgcagagagggagtggccaa

SEQ ID NO: 85 - DNA, 4677 bp, adeno-associated virus 2
ttggccactccctctctgcgcgctcgctcgctcactgaggccgggcgaccaaaggtcgcccgacgcccgggctttgcccgggcggcctcagtgagcgagcgagcgcgcagagagggagtggccaactccatcactaggggttcctggaggggtggagtcgtgacgtgaagtacgtcatagggttagggaggtcctgtattagaggtcacgtgagtgttttgcgacattttgcgacaccatgtggtcacgctggtatttaagcccgagtgagcacgcagggtctccattttgaagcgggaggtttgaacgcgcagccgccatgccgggattttacgagattgtgattaaggtccccagcgaccttgacgagcatctgcccggcatttctgacagctttgtgaactgggtggccgagaaggaatgggagttgccgccagattctgacatggatctgaatctgattgagcaggcacccctgaccgtggccgagaagctgcagcgcgactttctgacggagtggcgccgtgtgagtaaggccccggaggctcttttctttgcgcaatttgagaagggagagagctacttccacatgcacgtgctggtggagaccaccggggtgaaatccatggttttgggacgtttcctgagtcagattcgcgaaaaactgattcagagaatttaccgcgggatcgagccgactttgccaaactggttcgcggtcacaaagaccagaaatggcgccggaggcgggaacaaggtggtggatgagtgctacatccccaattacctgctccccaaaacccagcctgagctccagtgggcgtggactaatatggaacagtatttaagcgcctgtttgaatctcgcggagcgtaaacggttggtggcgcagcatctgacgcacgtgtcgcagacgcaggagcagaataaagagaatcagaatcctaattctgacgcgccggtgattagatcaaaaacctcagccaggtacatggagctggtcgggtggctcgtggataaggggatcacctccgagaagcagtggatccaggaggaccagtcttcatacatctccttcaatgcggcctccaactcgcggtcccagatcaaggctgctctggacaatgcggggaagatcatgagcctgactaaaaccgcccccgactacctggtgggccagcagcccgtggaggacatttccgaaaatcggatttataaaatcttggaactgaacgggtacgatccccaatacgcggcttccgtattcctgggatgggctacgaaaaagttcggcaagagaaacaccatctggctgtttgggcctgcaactaccgggaagaccaacatcgcggaggccatagcccacacggttcccttctacgggtgcgtaaactggaccaatgagaactttcccttcaacgactgcgtcgacaagatggtgatctggtgggaggagggaaaaatgaccgccaaggtcgtggagtcggccaaagccattctcggcggaagcaaggtgcgcgtggaccagaaatgcaagtcctcggcccagatagaccctactcctgtgatcgtcacctccaacaccaacatgtgcgccgtgattgacgggaactcaacgaccttcgagcaccagcagccgttgcaagaccggatgttcaaatttgaactcacccgccgtctggatcatgactttgggaaggtcaccaagcaggaagtcaaagacttttttcggtgggcccaagaccacgtggtagaggtggagcatgaattctacgtcaaaaagggtggagccaaaaaaaggcccgcccccagtgacgcagatataagtgagcccaaacgggcgcgcgagtcagttgcgcagccatcgacgtcagacgcggaagcttcgatcaactacgcggacaggtaccaaaacaaatgttctcgtcacgtgggcatgaatctgatgctgtttccctgcagacaatgcgagagaatgaatcagaattcaaatatctgcttcactcacggacagaaagactgtttagactgctttcccgtgtcagaatctcaacccgtttctgtcgtcaaaaagtcgtatcagaaactttgctacattcatcatatcatgggaaaggtaccagacgcttgcagtgcttgcgacctggtcaatgtggatttggatgactgcatctctgaacaataaatgatttaaatcaggtatggctgccgatggttatcttccagattggctcgaggacactctctctgaaggaataagacagtggtggaagctcaaacctggcccaccaccaccaaagcccgcagagcggcacaaggacgacagtaggggtcttgtgcttcctgggtacaagtacctcggacccttcaacggactcgacaaaggagagccggtcaacgaggcagacgccgcggccctcgaacacgacaaggcctacgaccggcagctcgacagcggagacaacccgtacctcaagtacaaccacgccgacgcggagtttcaggagcgtcttaaagaagatacgtcttttgggggcaacctcggacgagcagtcttccaggcgaaaaagagggttcttgaacctctgggcctggttgaggaacctgttaagacggctccgggaaaaaagaggccggtagagcattctcctgcggagccagactcctcctcgggaaccggaaaggcgggccagcagcctgcgagaaagagattgaatttcggtcagactggagacgcagactccgtacctgacccccagcctctcggacagccaccagcagccccctctggtctgggaactaatacgatggctacaggcagtggcgcaccaatggcagacaataacgagggcgccgacggagtgggtaattcctcgggaaattggcattgcgattccacatggatgggcgacagagtcatcaccaccagcacccgaacctgggctctgcccacctacaacaaccatctgtacaagcagatttccagccaatcaggagcatcgaacgacaaccactactttggctacagcaccccttgggggtattttgacttcaacagattccactgccacttctccccacgtgactggcaaagactcatcaacaacaactggggattccgacccaagagactcaacttcaagctctttaacattcaagtcaaggaggtcacgcagaatgacggtacgacgacgattgccaataaccttaccagcacggttcaggtgtttactgactcggagtaccagctcccgtacgtcctcggctcggcgcatcaaggatgcctcccgccgttcccagcagacgtcttcatggtgccacagtatggatacctcaccctgaacaacgggagtcaggcggtaggacgctcttcattttactgcctggagtactttccttctcagatgctgcgtaccggaaacaactttaccttcagctacacctttgaggacgttcctttccacagcagctacgctcacagccagagtttggaccgtctcatgaatcctctcatcgaccagtacctgtattacttgagcagaacaaacactccaagcggaaccaccacgatgtccaggcttcagttttctcaggccggagcgagtgacattcgggaccagtctaggaactggcttcctggaccctgttaccgccagcagcgagtatcaaagacagctgcggacaacaacaacagtgattactcgtggactggagctaccaagtaccacctcaatggccgggactcgttggttaatccaggaccagccatggccagccacaaagacgatgaagaaaagtattttcctcagagcggggttctcatcttcggaaaacaagactcgggaaaaactaatgtggacattgaaaaggtcatgattacagacgaagaggaaatcaggaccaccaatcccgtggctacggagcagtatggttctgtatctaccaaccttcaaagcggcaacacacaagcagctacctcagatgtcaacacacaaggcgttcttcctggcatggtctggcaggacagagacgtgtacctgcagggacccatctgggcaaagattccacacacggacggacactttcacccttctcccctcatgggcggatttggactgaagcaccctcccccgcagattctcatcaagaataccccggtacctgcgaatccttctaccaccttcagcgcggcaaagtttgcttccttcatcacacagtactccacggggcaggtcagcgtggagatcgagtgggagctgcagaaggagaacagcaaacgctggaaccccgagatccagtacacttccaactacaacaaatctgttaatgtggactttactgtggacactaatggcgtgtattcagagcctcgccccattggcaccagatacctgactcgtaatctgtaattgcttgttaatcaataaaccgtttaattcgtttcagttgaacttcagtctccgcgtacttctttcttatctagtttccatggctacgtagataagtagcatggcgggttaatcattaactttaaggaacccctagtgatggagttggccactccctctctgcgcgctcgctcgctcactgaggccgcccggcaaagcccgggcgtcgggcgacctttggtcgcccggcctcagtgagcgagcgagcgcgcagagagggagtggccaa

SEQ ID NO: 86 - DNA, 4680 bp, adeno-associated virus 2
ttggccactccctctctgcgcgctcgctcgctcactgaggccgggcgaccaaaggtcgcccgacgcccgggctttgcccgggcggcctcagtgagcgagcgagcgcgcagagagggagtggccaactccatcactaggggttcctggaggggtggagtcgtgacgtgaagtacgtcatagggttagggaggtcctgtattagaggtcacgtgagtgttttgcgacattttgcgacaccatgtggttacgcagggtatttaagcccgagtgagcacgcagggtctccattttgaagcgggaggtttgaacgcgcagccgccatgccgggtttttacgagattgtgattaaggtccccagcgaccttgacgagcatctgcccggcatttctgacagctttgtgaactgggtggccgagaaggaatgggagttgccgccagattctgacatggatctgaatctgattgagcaggcacccctgaccgtggccgagaagctgcagcgcgactttctgacggagtggcgccgcgtgagtaaggccccggaggccctcttctttgtgcaatttgagaagggagagagctacttccacatgcacgtgctggtggagaccaccggggtgaaatccatggttttgggacgtttcctgagtcagattcgcgaaaaactgattcagagaatttaccgcgggatcgagccgactttgccaaactggttcgcggtcacaaagacccgaaatggcgccggaggcgggaacaaggtggtggatgagtgctacatccccaattacctgctccccaaaacccagcctgagctccagtgggcgtggactaatatggaacagtatttaagcgcctgtttgaatctcgcggagcgtaaacggttggtggcgcagcatctgacgcacgtgtcgcagacgcaggagcagaacaaggagaatcagaatcccaattctgacgcgccggtgatcagatcaaaaacctcagccaggtacatggagctggtcgggtggctcgtggataaggggattacctcggagaagcagtggatccaggaggaccaggcttcatacatctccttcaatgcggcctccaactcgcggtcccaaatcaaggctgctctggacaatgcgggaaagatcatgagcctgactaaaaccgctcccgactacctggtgggccagcagcccgtggaggacatttccagcaatcggatttataaaatcttggaactgaacgggtacgatccccaatacgcggcttccgtctttctgggatgggccacgaaaaagttcggcaagaggaacaccatctggctgtttgggcctgcaactaccgggaagaccaacatcgcggaggccatagcccacactgtgcccttctacgggtgcgtaaactggaccaatgagaactttcctttcaatgattgcgtcgacaagatggtgatctggtgggaggaggggaagatgaccgccaaggtcgtggagtcggccaaagccattctcggaggaagcaaggtgcgcgtggaccagaaatgcaagtcctcggcccagatagacccgactcccgtgattgtcacctccaacaccaacatgtgcgccgtgattgacgggaactcaacgaccttcgaacaccagcagccgttgcaagaccggatgttcaaatttgaactcacccgccgtctggatcatgactttgggaaggtcaccaagcaggaagtcaaagactttttccggtgggcaaaggatcacgtggttgaggtggagcatgaattctacgtcaaaaagggtggagccaagaaaagacccgccccaagtgacgcagatataagtgagcccaaacgggcgcgcgagtcagttgcgcagccatcgacgtcagacgcggaagcttcgatcaactacgcggacaggtatcaaaacaaatgttctcgtcacgtgggcatgaatctgatgctgtttccctgcagacaatgcgagagaatgaatcagaattcaaatatctgcttcactcacggacagaaagactgcttagagtgctttcccgtgtcagaatctcaacccgtttctgtcgtcaaaaaggcgtatcagaaactttgctacattcatcatatcatgggaaaggtgccagacgcttgcactgcctgcgatctggtcaatgtggatttggatgactgcatctctgaacaataaatgatttaaatcaggtatggctgccgatggttatcttccagattggctcgaggacactctctctgaaggaataagacagtggtggaagctcaaacctggcccaccaccaccaaagcccgcagagcggcataaggacgacagcaggggtcttgtgcttcctgggtacaagtacctcggacccttcaacggactcgacaagggagagccggtcaacgaggcagacgccgcggccctcgagcacgacaaggcctacgaccggcagctcgacagcggagacaacccgtacctcaagtacaaccacgccgacgcggagtttcaggagcgtcttaaagaagatacgtcttttgggggcaacctcggacgagcagtcttccaggcgaaaaagagggttcttgaacctctgggcctggttgaggaacctgttaagacggctccgggaaaaaagaggccggtagagcactctcctgctgagccagattcctcctccggaactggaaagtcgggccaacagcctgcaagaaaaagattgaattttggtcagactggagacgcagactccgtaccagaccctcaacctctcggagaaccaccagcagcccccacaagtttgggatctactacaatggcttcaggcggtggcgcaccagtggcagacaataacgagggtgccgatggagtgggtaattcctcaggaaattggcattgcgattcccaatggctgggcgacagagtcatcaccaccagcacccgaacctgggccctgcccacctacaacaaccacctctacaagcaaatctccagccaatcaggagccagcaacgacaaccactactttggctacagcaccccttgggggtattttgacttcaacagattccactgccacttttcaccacgtgactggcaaagactcatcaacaacaattggggattccggcccaaaagactcaacttcaagctgtttaacattcaagtcaaagaggtcacgcagaatgacggtacgacgacgattgccaataaccttaccagcacggttcaggtgtttactgactcggagtaccagctcccgtacgtcctcggctcggcgcatcaaggatgccccccgccgttcccagcagacgtcttcatggtgccacagtatggatacctcaccctgaacaacgggagtcaggcggtaggacgctcttccttttactgcctggagtactttccttctcagatgcttcgtaccggaaacaactttaccttcagctacacctttgaagacgttcctttccacagcagctacgctcacagtcaaagtctggaccgtctcatgaatcctctcatcgaccagtacctgtattacttgagcagaacaaacactccaagcggaaccactacgcagtccaggcttcagttttctcaggccggagcgagtgacattcgggaccagtctaggaactggcttcctggaccctgttaccgccagcagcgagtatcaaagacagctgcggataacaacaacagtgaatactcgtggactggagctaccaagtaccacctcaatggcagagactctctggtgaatccgggcccggccatggccagccacaaggacgatgaagaaaagttttttcctcaaagcggggttctcatctttgggaagcaaggctcagagaaaacaaatgtggacattgaaaaggtcatgattacagacgaagaggaaatcaggaccaccaatcccgtggctacggagcagtatggttctgtatctaccaacctccagagcggcaacacacaagcagctacctcagatgtcaacacacaaggcgttcttccaggcatggtctggcaggacagagacgtgtacctgcagggacccatttgggccaagattcctcacaccgatggacactttcatccttctccgctgatgggaggttttggactcaaacacccacctcctcagatcatgatcaaaaacactcccgttccagccaatcctcccacaaacttcagttctgccaagtttgcttccttcattacacagtattccacggggcaggtcagcgtggagatcgagtgggagctgcagaaggagaacagcaagcgctggaaccctgagatccagtacacttccaactataacaaatctgttaatgtggactttactgtggacactaatggtgtgtattcagagcctcgccccattggcaccagatacctgactcgtaatctgtaattgcttgttaatcaataaaccgtttaattcgtttcagttgaactttggtctccgcgtacttcttttcttatctaggttccatggctacgtagataagtagcatggcgggttaatcattaactacaaggaacccctagtgatggagttggccactccctctctgcgcgctcgctcgctcgctgaggccgggcgaccaaaggtcgcccgacgcccgggctttgcccgggcggcctcagtgagcgagcgagcgcgcagagagggagtggccaa

SEQ ID NO: 87 - DNA, 4679 bp, adeno-associated virus 2
ttggccactccctctctgcgcgctcgctcgctcactgaggccgggcgaccaaaggtcgcccgacgcccgggctttgcccgggcggcctcagtgagcgagcgagcgcgcagagagggagtggccaactccatcactaggggttcctggaggggtggagtcgtgacgtgaagtacgtcatagggttagggaggtcctgtattaggggtcacgtgagtgttttgcgacattttgcgacaccatgtggtcacgctgggtatttaagcccgagtgagcacgcagggtctccattttgtagcgggaggtttgaacgcgcagccgccatgccgggattttacgagattgtgattaaggtccccagcgaccttgacgagcatctgcccggcatttctgacagctttgtgaactgggtggccgagaaggaatgggagttgccgccagattctgacatggatctgaatctgattgagcaggcacccctgaccgtggccgagaagctgcagcgcgactttctgacggagtggcgccgcgtgagtaaggccccggaggccctcttctttgtgcaatttgagaagggagagagctacttccacatgcacgtgctggtgcaaccaccggggtttaaatccatggttttgggacgtttcctgagtcaaattcgcgaaaaactgattcaaagaatttaccgcgggatcgagccgactttgccaaactggttcgcggtcacaaagacccgaaatggcgccggaggcgggaacaaggtggtggatgagtgctacatccccaattacctgctccccaaaacccagcctgagctccagtgggcgtggactaatatggaacagtatttaagcgcctgtttcaatctcgcggagcgtaaacggttggtggcgcagcatctgacgcacgtgtcgcagacgcaggagcagaacaaagagaatcagaatcccaattctgacgcgccggtgattagatcaaaaacctcagccaggtacatggagctggtcgggtggctcgtggataaggggattacctcggagaagcagtggatccaggaggaccaggcctcatacatctccttcaatgcggcctccaactcgcggtctcaaatcaaggctgctctggacaatgcggggaagatcatgagcctgactaaaacggcccccgactacctggtgggccagcagcccgtggaggacatttccagcaatcggatctataaaatattggaactgaacgggtacgacccccaatatgcggcttccgtctttctgggatgggccacgaaaaagttcggcaagaggaacaccatctggctgtttgggcctgcaactaccgggaagaccaacatcgcggaggccatagcccacactgtgcctttttacgggtgcgtaaactggaccaatgagaactttccgttcaacgattgcgtcgacaagatggtgatttggtgggaggaggggaagatgaccgccaaggtcgtggagtcggccaaagccattctcggaggaagaaaggtgcgcgtggaccagaaatgcaagtcctcggcccagatagacccgactcccgtgatcgtcacctccaacaccaacatgtgcgccgtgattgacgggaactcaacgaccttcgaacaccagcagccgttgcaagaccggatgttcaaatttgaactcacccgccgtctggatcatgactttgggaaggtcaccaagcaggaagtcaaagactttttccggtgggcaaaggatcacgtggttgaggtggagcatgaattctacgtcaaaaagggtggagccaagaaaagacccgcccccagtgacgcagatataagtgagcccaaacgggcgcgcgagtcagttgcgcagccatcgacgtcagacgcggaagcttcgatcaactacgcggacaggtaccaaaacaaatgttctcgtcacgtgggcatgaatctgatgctgtttccctgcagacaatgcgagagaatgaatcagaattcaaatatctgcttcactcacggacagaaagactgtttagagtgctttcccgtgtcagaatctcaacccgtttctgtcgtcaaaaaggcgtatcagaaactttgctacattcatcatatcatgggaaaggtgccagacgcttgcactgcttgcgatctggtcaatgtggatttggatgactgcatctctgaacaataaatgatttaaatcaggtatggctgccgatggttatcttccagattggctcgaggacactctctctgaaggaataagacagtggtggaagctcaaacctggcccaccaccaccaaagcccgcagagcggcatcaggacgacagcaggggtcttgtgcttcctgggtacaagtacctcggacccttcaacggactcgacaagggagagccggtcaacgaggcagacgccgcggccctcgagcacgacaaagcctacgaccggcagctcgacagcggagacaacccgtacctcaagtacaaccacgccgacgcggagtttcaggagcgtcttaaagaagatacgtcttttgggggcaacctcggacgagcagtcttccaggcgaaaaagagggttcttgaacctctgggcctggttgaggaacctgttaagacggctccgggaaaaaagaggccggtagagcactctcctgcggagccagactcctcctcgggaaccggaaaagcgggccagcagcctgcaagaaaaagactgaatttcggtcagactggagacgcagactccgtacctgacccccagcctctcggacagccaccagcagcccccacaagtttgggatctactacaatggctacaggcagtggcgcaccaatggcagacaataacgagggtgccgatggagtgggtaattcctcaggaaattggcattgcgattcccaatggctgggcgacagagtcatcaccaccagcacccgaacctgggccctgcccacctacaacaaccacctttacaagcaaatctccagccaatcaggagcctcaaacgacaaccactactttggctacagcaccccctgggggtattttgacttcaacagattccactgccacttttcaccacgtgactggcaaagactcatcaacaacaactggggattccgacccaagagactcaacttcaagctctttaacattcaagtcaaagaggtcacgcagaatgacggtacgacgacgattgccaataaccttaccagcacggttcaggtgtttactgactcggagtaccagctcccgtacgtcctcggctcggcgcatcaaggatgcctcccgccgttcccagcagacgtcttcatggtgccacagtatggatacctcaccctgaacaacgggagtcaggcggtaggacgctcttccttttactgcctggagtactttccttctcagatgctgcgtaccggaaacaactttaccttcagctacacttttgaggacgttcctttccacagcagctacgctcacagccagagtctggatcgtctgatgaatcctctcatcgaccagtacctgtattatctaaacagaacacaaacarccagtggaactcccacgcagtctcggctactgtttagccaagctggacccacaagcatgtctcttcaagctaaaaactggctgcctggaccgtgttatcgccagcagcgtttgtcaaagcaggcaaacgacaacaacaacagcaactttccctggactggagctaccaagtaccacctcaatggcagagactctttggtgaacccgggcccggccatggccagccacaaggacgatgaagaaaagtttttccccatgcatggaaccctaatctttgggaagcaaggctcagagaaaaccaacgcggaattggaaaatgtcatgattacagatgaagaggaaatcaggaccaccaatcccgtggctacagagcagtatggttctgtatctaccaacctccagagaggcaacagacaagcagctaccgcagatgtcaacacacaaggcgttcttccaggcatggtctggcaggacagagatgtgtaccttcaggggcccatctgggcaaagattccacacacggacggacattttcacccctctcccctcatgggtggattcggacttaaacaccctcctccacagattctcatcaagaacaccccggtacctgcgaatccttcgaccaccttcagtgcggcaaagtttgcttccttcatcacacagtattccacgggacaggtcagcgtggagatcgagtgggagctgcagaaggagaacagcaaacgctggaaccccgagatccagtacacttccaactacaacaaatctgttaatgtggactttactgtggacactaatggtgtgtattcagaggctcgccccattggcaccagatacctgactcgtaatctgtaattgcttgttaatcaataaaccgtttaattcgtttcagttgaactttggtctccgcgtacttctttcttatctagtttccatggctacgtagataagtagcatggcgggttaatcattaaatctaaggaacccctagtgatggagttggccactccctctctgcgcgctcgctcgctcactgaggccgggcgaccaaaggtcgcccgacgcccgggctttgcccgggcggcctcagtgagcgagcgagcgcgcagagagggagtggccaa

SEQ ID NO: 88 - DNA, 4676 bp, adeno-associated virus 2
ttggccactccctctctgcgcgctcgctcgctcactgaggccgggcgaccaaaggtcgcccgacgcccgggctttgcccgggcggcctcagtgagcgagcgagcgcgcagagagggagtggccaactccatcactaggggttcctggaggggtggagtcgtgacgtgaattacgtcatagggttagggaggtcctgtattagaggtcacgtgagtgttttgcgacattttgcgacaccatgtggtcacgctgggtatttaagcccgagtgagcacgcagggtctccattttgaagcgggaggtttgaacgcgcagccgccatgccgggattttacgagattgtgattaaggtccccagcgaccttgacgagcatctgcccggcatttctgacagctttgtgaactgggtggccgagaaggaatgggagttgccgccagattctgacatggatctgaatctgattgagcaggcacccctgaccgtggccgaaaagctgcagcgtgactttctgacggaatggcgccgtgtgagtaaggccccggaggcccttttctttgtgcaatttgagaagggagagagctacttccacatgcacgtgctcgtggaaaccaccggggtgaaatccatggttttgggacgtttcctgagtcagattcgcgaaaaactgattcagagaatttaccgcgggatcgagccgactttgccaaactggttcgcggtcacaaagacccgaaatggcgccggaggcgggaacaaggtggtggatgagtgctacatccccaattacttgctccccaaaacccagcctgagctccagtgggcgtggactaatatggaacagtatttaagcgcctgtttgaatctcacggagcgtaaacggttggtggcgcagcatctgacgcacgtgtcgcagacgcaggagcagaacaaagagaatcagaatcccaattctgatgcgccggtgatcagatcaaaaacttcagccaggtacatggagctggtcgggtggctcgtggacaaggggattacctcggagaagcagtggatccaggaggaccaggcctcatacatctccttcaatgcgtcctccaactcgcggtcccaaatcaaggctgccttggacaatgcgggaaagatcatgagcctgactaaaaccgcccccgactacctggtgggccagcagcccgtggaggacatttccagcaatcggatttataaaatcttggaactgaacgggtacgatccccaatatgcggcttccgtctttctgggatgggccacgaaaaagttcggcaagaggaacaccatctggctgtttgggcctgcaactaccgggaagaccaggaggatgtcctccagcttgggcaacgtgcccttctacgggtgcgtaaactggaccaatgagaactttcccttcaacgactgcgtcgacaagatggtgatctggtgggaggagggaaagatgactgccaaggtcgtggagtctgccaaagccattctcggaggaagcaaggtgcgcgtggaccagaaatgcaagtcctcggcccagatagacccgactcccgtgatcgtcacctccaacaccaacatgtgcgccgtgattgacgggaactcaacgaccttcgaacaccagcagccgttgcaagaccggatgttcaaatttgaactcactagccgtctggatcatgactttgggaaggtcaccaagcaggaagtcaaagactttttccggtgggcaaaggatcacgtggttgaggtggagcatgaattctacgtcaaaaagggtggagccaaaaaaagacccgcccccagtgacgcagatataagtgagcccaaacgggtgcgcgagtcagttgcgcagccatcgacgtcagacgcggaagcttcgatcaactacgcggacaggtaccaaaacaaatgttctcgtcacgtgggcatgaatctgatgctgtttccctgcagacaatgcgagagaatgaatcagaattcaaatatctgcttcactcacggacagaaagactgtttagagtgctttcccgtgtcagaatctcaacccgtttctgtcgtcaaaaaggcgtatcagaaactgtgctacattcatcatattatgggaaaggtgccagacgcttgcactgcctgcgatctggtcaatgtggatttggatgactgcatctctgaacaataaatgatttaaatcaggtatggctgccgatggttatcttccagattggctcgaggacactctctctgaaggaataagacagtggtggaagctcaaacctggcccaccaccaccaaagcccgcagagcggcataaggacgacagcaggggtcttgtgcttcctgggtacaagtacctcggacccttcaacggactcgacaagggagagccggtcaacgaggcagacgccgcggccctcgagcacgacaaggcctacgaccggcagctcgacagcggagacaacccgtacctcaagtacaaccacgccgacgcggagtttcaggagcgccttaaagaagatacgtcttttgggggcaacctcggacgagcagtcttccaggcgaaaaagagggttcttgaacctctgggcctggttgaggaacgtgttaagacggctccgggaaaaaagaggccggtagcagtggcgcaccagtggcagacaataacgagggtgccgatggagtgggtaattcctcaggaaaaaagattgaattttggtcagactggagacgcagattggcattgcgacccccagcctctcggacagccaccagcagccccctctggtttgggatctactacaatggctacaggcagtggcgcactattattattggaaagcttgagtgccgatggagtgggtaattcctcaggaaattggcattgcgattcccaatggctgggcgacagagtcatcaccaccagcacccgaacctgggccctgcccacctacaacaaccacctctacaagcaaatctccagccaatcaggagcctcaaacgacaaccactactttggctacagcaccccttgggggtattttgacttcaacagattccactgccacttttcaccacgtgactggcaaagactcatcaacaacaactggggattccgacccaagagactcaacttcaagctctttaacattcaagtcaaagaggtcacgcagaatgacggtacgacgacgattgccaataaccttaccagcacggttcaggtgtttactgactcggagtaccagctcccgtacgtcctcggctcggcgcatcaaggatgcctcccgccgtttccagcggacgtcttcatggtgccacagtatggatacctcaccctgaacaacgggagtcaggcagtaggacgctcttcattttactgcctggagtactttccttctcagatgctgcgtactggaaacaactttcagttcagctacacctttgaagacgttcctttccacagcagctacgctcacagccagagtctggatcggctgatgaatcctctgatcgaccagtacctgtattatctgaacaaaacacaatcaaatagtggaaccaccacgatgtcaaggctactgtttagtcaagctggacccaccagcatgtctcttcacgctaaaaactggctgcctggaccttgctacagacagcagcgtctgtcaaagcaggcaaacgacaacaacaacagcaactttccctggactgcagctacaaagtatcatctaaatggcagtgactcgttgattaatccaggaccagctatggccagccacaaagacgatgaagaaaagttttttcctcagagcggggttctcatctttgggaagcaaggctcagagaaaacaaatgtggacattgaaaaggtcatgattacagacgaagaggaaatcaggacaaccaatcccgtggctacggagcagtatggatctgtatctaccaacctccagagaggcaacagacgagcagctaccgcagatgtcaacacacaaggcgttcttccaggcatggtctggcaggacagagatgtgtaccttcaggggcccatctgggcaaagattccacacacggacggacattttcacccctctcccctcatgggtggattcggacttaaacaccctcctccacagattctcatcaagaacaccccggtacctgcgaatccttcgaccaccttcagtgcggcaaagtttgcttccttcatcacacagtactccacgggacaggtcagcgtggagatcgagtgggagctgcagaaggaaaacagcaaacgctggaatcccgaaattcagtacacttccaactacaacaagtctgttaatgtggactttactgtggacactaatggcgtgtattcagagcctcgccccattggcaccagatacctgactcgtaatctgtaattgcttgttaatcaataaaccgtttaattcgtttcagttgaactttggtctctgcgtgcttctttcttatctagtttccatggctacgtagataagtagcatggcgggttaatcattaactataaggaacccctagtgatggagttggccactccctctctgcgcgctcgctcgctcactgaggccgggcgaccaaaggtcgcccgacgcccgggctttgcccgggcggcctcagtgagcgagcgagcgcgcagagagggagtggccaa

SEQ ID NO: 89 - DNA, 4680 bp, adeno-associated virus 2
ttggccactccctctctgcgcgctcgctcgctcactgaggccgggcgaccaaaggtcgcccgacgcccgggctttgcccgggcggcctcagtgagcgagcgagcgcgcagagagggagtggccaactccatcactaggggttcctggaggggtggagtcgtgacgtgaagtacgtcatagggttagggaggtcctgtattagaggtcacgtgagtgttttgcgacattttgcgacaccatgtggttacgcagggtatttaagcccgagtgagcacgcagggtctccattttgaagcgggaggtttgaacgcgcagccgccatgcctggattttacgagattgtgattaaggtccccagcgaccttgacgagcatctgcccggcatttctgacagctttgtgaactgggtggccgagaaggaatgggagttgccgccagattctgacatggatctgaatctgattgagcaggcacccctgaccgtggccgagaagctgcagcgcgactttctgacagaatggcgccgtgtgagtaaagcccccgaggcccagatcacaaagtcaggagagaagggagagagctacttccacatgcacgtgctggtggaaaccaccggggtgaaatccatggttttgggacgtttcctgagtcagattcgcgaaaaactgattcagagaatttaccgcgggatcgaaccgactttgccatactggttcgcggtcacaaagacccgaaatggcgccggaggcgggaacaaggtggtggatgagtgctacatccccaattacctgctccccaaaacccaacctgagctccagtgggcgtggactaatatggaacagtatttaagcgcctgtttgaatctcgcggagcgtaaacggttggtggcgcagcatctgacgcacgtgtcgcagacgcaggagcagaacaaagagaatcagaatcccaattctgacgcgccggtgatcagatcaaaaacctcagccaggtacatggagctggtcgggtggctcgtggataaggggattacctcggagaagcagtggatccaggaggaccaggcctcatacatctctttcaatgcggcctccaactcgcggtcccatatcaaggctgctttggacaattctggaaagatcatgagccttactaaaatggcatttgacccagcctatatccagcagcccgtggaggacatttccagcaaccggatctataaaatcttggaactgaacgggtacgatccccaatacgcggcttccgtctttctgggatgggccacgaaaaagttcggcaagaggaacaccatctggctgtttgggcctgcaactaccgggaagaccaacatcgcggaggccatagctcacactgtgcccttctacgggtgcgtaaactggaccaatgagaactttcctttcaatgattgcgtcgacaaaatggtgatctggtgggaggagggaaagatgaccgccaaggtcgtggagtcggccaaagccattctcggcggaagcaaggtgcgcgtggaccagaaatgcaagtcctcggcccagatagacccgactcccgtgatcgtcacctccaacaccaacatgtgcgccgtgattgacgggaactcaacgaccttcgaacaccagcagccgttgcaagaccggatgttcaaatttgaactcacccgccgtctggatcatgactttgggaaggtcaccaagcaggaagtcaaagactttttccggtgggcaaaggatcacgtggttgaggtggagcatgaattctacgtcaaaaagggtggagccaagaaaagacccgcccccagtgacgcagatataagtgagcccaaacgggcgcgcgagtcagttgcgcagccatcgacgtcagacgcggaagcttcaatcaactacgcggacaggtaccaaaacaaatgttctcgtcacgtgggcatgaatctgatgctgtttccctgcagacaatgcgagagaatgaatcagaattcaaatatctgcttcactcacggacagaaagactgtttagagtgctttcccgtgtcagaatctcaacccgtttctgtcgtcaaaaaggcgtatcagaaactgtgctacattcatcatatcatgggaaaggtgccagacgcttgcactgcctgcgatctggtcaatgtggatttggatgactgcatctctgaacaataaatgatttaaatcaggtatggctgccgatggttatcttccagattggctcgaggacactctctctgaaggaataagacagtggtggaagctcaaacctggcccaccaccaccaaagtccgcagagcggcataaggacgacagcaggggtcttgtgcttcctgggtacaagtacctcggacccttcaasggactcgacaaaggagagccggtcaacgaggcagacgccgcggccctcgagcacgacaaggcctacgaccggcagctcgacagcggagacaacccgtacctcaagtacaaccacgccgacgcggagtttcaggagcgccttaaagaagatacgtcttttgggggcaacctcggacgagcagtcttccaggcgaaaaagagggttcttgamcctctgggccyggttgaggaacctgttaagacggctccgggaaaaaagaggccggtagagcactctcctgtggagccagactcctcctcgggaaccggaaaagcgggccagcagcctgcaagaaaaagactgaatttcggtcagactggagactcagactcaagctccagggatatgagaaaagtattttctgcagcagcccccacaagtttgggatctactacaatggcttcaggcggtggcgcaccagtggcagacaataacgagggtgccgatggagtgggtaattcctcaggaaattggcattgcgattcccaatggctgggcgacagagtcatcaccaccagcacccgaacctgggccctgcccacctacaacaaccacctctacaagcaaatctccagccaatcaggagccagcaacgacaaccactactttggctacagcaccccttgggggtattttgacttcaacagattccactgccacttttcaccacgtgactggcaaagactcatcaacaacaattggggattccggcccaagagactcaacttcaagctctttaacattcaagtcaaagaggtcacgcagaatgacggtacgacgacgattgccaataaccttaccagcacggttcaggtgtttactgactcggagtaccagctcccgtacgtcctcggctcggcgcatcaaggatgcctcccgccgttcccagcggacgtcttcatggtcccacagtatggatacctcaccctgaacaacgggagtcaggcggtaggacgctcttccttttactgcctggagtactttccttctcagatgctgcgtactggaaacaactttcagtttagctacacttttgaagacgttcctttccacagcagctacgctcacagccagagtctggatcggctgatgaatcctctgatcgaccagtacctgtattatctgaacaagacacaaacaaatagtggaactcttcagcagtctcggctactgtttagccaagctggaccaaccaacatgtctcttcaagctaaaaactggctgcctggaccttgctacagacagcagcgtctgtcaaagcaggcaaacgacaacaacaacagcaactttccctggactgcagctacaaagtatcacctcaatggcagagactctctggtgaatccgggcccggccatggcaagccacaaggacgatgaagaaaagttttttcctcagagcggggttctcatctttgggaagcaaggctcagagaaaacaaatgtggacattgaaaaggtcatgattacagacgaagaggaaatcaggacaaccaatcccgtggctacggagcagtatggttctgtatctaccaacctccagagaggcaacagacaagcagctaccgcagatgtcaacacacaaggcgttcttccaggcatggtctggcaggacagagatgtgtaccttcaggggcccatctgggcaaagattccacacacggacggacattttcacccctctcccctcatgggtggattcggacttaaacaccctcctccacagattctcatcaagaacaccccggtacctgcgaatccttcgaccaccttcagtgctgccaagtttgcttctttcatcacacagtattccacggggcaggtcagcgtggagatcgagtgggagctgcagaaggagaamagcaaacgctggaatcccgagattcagtacacttccaactacaacaaatctgttaatgtggactttactgtggacactaatggtgtgtattcagagcctcgccccattggcaccagatacctgactcgtaatctgtaattgcttgttaatcaataaaccgtgtaattcgtttcagttgaactttggtctccgcgtacttcttttcttatctagtttccatggctacgtagataagtagcatggcgggttaatcattaaccacaaggaacccctagtgatggagttggccactccctctctgcgcgctcgctcgctcactgaggccgggcgaccaaaggtcgcccgacgcccgggctttgcccgggcggcctcagtgagcgagcgagcgcgcagagagggagtggccaa

SEQ ID NO: 90 - DNA, 4679 bp, adeno-associated virus 2
ttggccactccctctctgcgcgctcgctcgctcactgaggccgggcgaccaaaggtcgcccgacgcccgggctttgcccgggcggcctcagtgagcgagcgagcgcgcagagagggagtggccaactccatcactaggggttcctggaggggyggagtcgtgacgtgaagtacgtcatagggttagggaggtcctgtattagaggtcacgtgagtgttttgcgacattttgcgacaccatgtggtcacgctgagtatttaagcccgagtgagcacgcagggtctccattttgaagcgggaggtttgaacgcgcagccgccatgccgggattttacgagattgtgattaaggtccccagcgaccttgacgagcatctgcccggcatttctgacagctttgtgaactgggtggccgagaaggaatgggagttgccgccagattctgacatggatctgaatctgattgagcaggcacccctgaccgtggccgagaagctgcagcgcgactttctgacagagtggcgccgcgtgagtaaggccccggaggcccttttctttgtgcaatttgagaagggagagagctacttccacatgcacgtgctcgtggaaaccaccggggtgaaatccatggttttaggacgtttcctgagtcagattcgcgaaaaactgattcagagaatttaccgcgggatcgagccgactttgccaaactggttcgcggttacaaagacccgaaatggcgccggaggcgggaacaaggtggtggatgagtgctacatccccaattacctgctccccaaaacccagcctgagctccagtgggcgtggactaatatggaacagtatttaagcgcctgtttgaatctcgctgagcgtaaacggttggtggcgcagcatctgacgcacgtgtcgcagacgcaggagcagaacaaagagaatcagaatcccaattctgacgcgccggtgattagatcaaaaacctcagccaggtacatggagctggtcgggtggctcgtggataaggggattacctcggagaagcagtggatccaggaggaccaggcctcatacatctccttcaatgcggcctccaactcgcggtcccaaatcaaggctgccttggacaatgcgggaaagatcatgagcctgactaaaaccgcccccgactacctggtgggccagcagcccgtggaggacatttccagcaatcggatttataaaattttggaactaaacgggtacgatccccaatatgcggcttccgtctttctgggatgggccacgaaaaagtttggcaagaggaacaccatctggctgtttgggcctgcaactaccgggaagaccaacatcgcggaggccatagcccacactgtgcccttctacgggtgcgtaaactggaccaatgagaactttcccttcaacgactgtgtcgacaagatggtgatctggtgggaggagggaaagatgaccgccaaggttgtggagtcggccaaagctattctcggaggaagcaaggtgcgcgtggaccagaaatgcaagtcctcggcccagatagacccgactcccgtgatcgtcacctccaacaccaacatgtgcgccgtgattgacgggaactcaacgaccttcgaacaccagcagccgttgcaagaccggatgttcaaatttgaactcacccgccgtctggatcatgactttgggaaggtcaccaagcaggaagtcaaagactttttccggtgggcaaaggatcacgtggttgaggtggagcatgaattctacgtcaaaaagggtggagccaagaaaagacccgcccccagtgacgcagatataagtgagcccaaacgggtgcgcgagtcagttgcgcagccatcgacgtcagacgcggaagcttcaatcaactacgcggacaggtaccaaaacaaatgttctcgtcacgtgggcatgaatctgatgctgtttccctgcagacaatgcgagagaatgaaycagaattcaaatatttgcttcactcacggacagaaagactgtttagagtgctttcccgtgtcagaatctcaacccgtttctgtcgtcaaaaaggcgtatcagaaactttgctacattcatcatatcatgggaaaggtgccagacgcttgcactgcctgcgatctggtcaatgtggatttggatgactgcatctttgaacaataaatgatttaaatcaggtatggctgccgatggttatcttccagattggctcggggagaccctctctcaaggaataagacagtggtggaagctcaaacctggcccaccaccaccaaagcccgcagagcggcataaggrcgacagcaggggtcttgtgcttcctgggtacaagtacctcggacccttcaacggactcgacaagggagaaccggtcaacgaggcagacgccgcggccctcgaacacgacaaggcctacgaccggcagctcgacagcggacacatcccgtacctcaagtacaaccacgccgacgcggagtttcaggagcgccttaaagaagatacgtcttttgggggcaacctcggacgagcagtcttccaggcgaaaaagagggttcttgaacctctgggcctggttgaggaacctgttaagacggctccgggaaaaaagaggccggtagagcactctcctgtggagccagactcctcctcgggaaccggaaaagcgggccagcagcctgcaagaaaaagattgaatttcggccagactggagacgcagactccgtacctgacccccagcctctcggacagccaccagcagccccctctggtctgggaactactacgatggctacaggcagtggcgcaccagtggcagacaataacgagggtgccgatggagtgggtaattcctcaggaaattggcattgcgattcccaatggctgggcgacagagtcatcaccaccagcacccgaacctgggccctgcccacctacaacaaccacctctacaacttttttcaaattaaaataaatgcctcgaacgacaatcactactttggctacagcaccccttgggggtattttgacttcaacagattccactgccacttttcaccacgtgactggcaaagactcatcaacaacaactggggattccgacccaagagactcaacttcaagctctttctcattcaagtcaaagaggtcacgcagaatgacggtacgacgacgattgccaataaccttaccagcacggttcaggtgtttactgmctcggagtaccagctcccgtacgtcctcggctcggcscaycaaggrtgccycccgccgttcccagcggacgtcttcatggtcccacagtatggatacctcaccctgaacaacgggagtcaggcggkaggacgctcttcattttactgcctggagtactttccttctcagatgctgcgtactggaaacaactttcagttcagctacacctttgaagacgttcctttccacagcagctacgctcacagccagagtctggatcggctgatgaatcctctgatcgaccagtacctgtattatctgaacaaaacacaatcaaatagtggaactcttcagcagtctcggctactgtttagtcaagctggacccaccagcatgtctcttcaagctaaaaactggctgcctggaccctgttaccgccagcagcgagtatcaaagacatctgcggataacaacaacagtgaatactcgtggactggagctaccaagtaccacctcaatggcagagactctctggtgaatccgggcccggccatggcaagccacaaggacgatgaagaaaagttttttcctcagagcggggttctcatctttgggaagcaaggctcagagaaaacaaatgtggacattgaaaaggtcatgattacagacgaagaagaaatccgcaccaccaatcccgtggctacggagcagtacggatatgtgtcaaataatttgcaaaactcaaatagacaagcagctaccgcagatgtcaacacacaaggcgttcttccaggcatggtctggcaggacagagatgtgtaccttcaggggcccatctgggcaaagattccacacacggacggacattttcacccctctcccctcatgggtggattcggacttaaacaccctcctccacagattctcatcaagaacaccccggttccagccaatcctcctacaaacttcagttctgccaagtttgcttctttcatcacacagtactccacggggcaggtcagcgtggagatcgagtgggagctgcagaaggaaaacagcaaacgctggaatcccgagattcagtacacttccaactacaacaaatctgttaatgtggactttactgtggacactaatggtgtgtattcagagcctcgccccattggcaccagatacctgactcgtaatctgtaattgcttgttaatcaataaaccgtttaattcgtttcagttgaactttggtctctgcgtacttctttcttatctagtttccatggctacgtagataagtagcatggcgggttaatcattaactataaggaacccctagtgatggagttggccactccctctctgcgcgctcgctcgctcactgaggccgggcgaccaaaggtcgcccgacgcccgggctttgcccgggcggcctcagtgagcgagcgagcgcgcagagagggagtggccaa

SEQ ID NO: 91 - DNA, 4679 bp, adeno-associated virus 2
ttggccactccctctctgcgcgctcgctcgctcactgaggccgggcgaccaaaggtcgcccgacgcccgggctttgcccgggcggcctcagtgagcgagcgagcgcgcagagagggagtggccaactccatcactaggggttcctggaggggtggagtcgtgacgtgaagtacgtcatagggttagggaggtcctgtattagaggtcacgtgagtgttttgcgacattttgcgacaccatgtggttacgctgggtatttaagcccgagtgagcacgcagggtctccattttgaagcgggaggtttgaacgcgcagccgccatgccggggttttacgagattgtgattaaggtccccagcgaccttgacgagcatctgcccggcatttctgacagctttgtgaactgggtggccgagaaggaatgggagttgccgccagattctgacatggatctgaatctgattgagcaggcacccctgaccgtggccgagaagctgcagcgcgactttctgacggaatggcgccgtgtgagtaaggccccggaggcccttttctttgtgcaatttgagaagggagagagctacttccacatgcacgtgctcgtggaaaccaccggggtgaaatccatggttttgggacgtttcctgagtcagattcgcgaaaaactgattcagagaatttaccgcgggagcgagccgactttgccaaactggttcgcggtgacaaagacccgaaatggcgccggaggcgggaacgaggtggtggatgagtgctacatccccaattacttgctccccaaaacccagcctgagctccagtgggcgtggactaatatggaacagtatttaagcgcctgtttgaatctcacggagcgtaaacggttggtggcgcagcatctgacgcacgtgtcgcagacgcaggagcagaacaaagagaatcagaatcccaattctgacgcgccggtgatcagatcaaaaacctcagccaggtacatggagctggtcgggtggctcgtggataaggggattacctcggagaagcagtggatccaggaggaccaggcttcatacatctccttcaatgcggcctccaactcgcggtcccaaatcaaggctgccttggacaatgcggggaagatcatgagcctgactaaaaccgcccccgactacctggtgggccagcagcccgtggaggacatttccagcaatcggatttataaaatcttggaactgaacgggtacgatccccaatatgcggcttccgtctttctgggatgggccacgaaaaagttcggcaagaggaacaccatctggctgtttgggcctgcaactaccgggaagaccaacatcgcggaggccatagcccacactgtgcccttctacgggtgcgtaaactggaccaatgagaactttcccttcaacgactgtgtcgacaagatggtgatctggtgggaggaggggaagatgaccgccaaggtcgtggagtcggccaaagccattctcggaggaagcaaggtgcgcgtggaccagaaatgcaagtcctcggcccagatagacccgactcccgtgatcgtcacctccaacaccaacatgtgcgccgtgattgacgggaactcaacgaccttcgaacaccagcagccgttgcaagaccggatgttcaaatttgaactcacccgccgcctggatcatgactttgggaaggtcacaaagcaggaagtcaaagacttttttcggtgggcaaaggatcacgtggttgaggtggagcatgaattctacgtcaaaaagggtggagccaagaaaagacccgcccccagtgacgcagatataagtgagcccaaacgggcgcgcgagtcagttgcgcagccatcgacgtcagacgcggaagcttcgatcaactacgcagacaggtaccaaaacaaatgttctcgtcacgtgggcatgaatctgatgctgtttccctgtagacaatgcgaaagaatgaatcagaattcaaatatctgcttcactcacggacagaaagactgtttagagtgctttcccgtgtcagaatctcaacccgtttctgtcgtcaaaaaggcatatcagaaactttgctacattcatcatatcatgggaaaggtgccagacgcttgcactgcctgcgatctggtcaatgtggatttggatgactgcatctctgaacaataaatgatttaaatcaggtatggctgccgatggttatcttccagattggctcgaggacactccctctgcaggaataagtcagtggtggaagctcaaacctggcccaccaccaccaaagcccgcagagcggcataaggacgacagcaggggtcttgtgcttcctgggtacaagtacctcggacccttcaacggactcgacaagggagagccggtcaacgaggcagacgccgcggccctcgagcacgacaaggcctacgaccggcagctcgacagcggagacaacccgtacctcaagtacaaccacgccgacgcggagtttcaggagcgccttaaagaagatacgtcttttgggggcaacctcggacgagcagtcttccaggcgaaaaagagggttcttgaacctctgggcctggttgaggaacctgttaagacggctccgggaaaaaagaggccggtagagcactctcctgtggagccagactcctcctcgggaaccggaaaggcgggccagcagcctgcaagaaaaagattgaatttcggtcagactggagacgcagactccgtacctgacccccagcctctcggacagccaccagcagccccctctggtctgggaactaatacgatggctacaggcagtggcgcaccaatggcagacaataacgagggcgccgacggagtgggtaattcctcgggaaattggcattgcgattcccaatggctgggcgacagagtcatcaccaccagcacccgaacctgggccctgcccacctacaacaaccacctctacaagcaaatctccagccaatcaggagcttcaaatgacaaccactactttggctacagcaccccctgggggtattttgacttcaacagattccactgccacttttcaccacgtgactggcaaagactcatcaacaacaactggggattccgacccaagaaactcaacttcaagctctttaacattcaagtcaaagaggtcacgcagaatgacggtacgacgacgattgccaataaccttaccagcacggttcaggtgtttactggctcggggtacgggctccggtacgtcctcggctcggcgcatcaaggatgcctcccgccgtttccagcggacgtcttcatggtcccacagtatggatacctcaccctgaacaacgggagtcaggcagtaggacgctcttccttttactgcctggagtactttccttctcagatgctgcgtactggaaacaactttcagttcagctacacctttgaagacgttcctttccacagcagctacgctcacagccagagtctggatcggctgatgaatcctctgattgaccagtacctgtattatctgaacaagacacaatcaaatagtggaactcttcagcagtcaaggcttcagttttctcaggccggagcgagtgacattcgggaccagtctaggaactggcttcctggaccctgttaccgccagcagcgagtatcaaagacatctgcggataacaacaacagtgaatactcgtggactggagctaccaagtaccacctcaatggcagagactctctggtgaatccgggcccggccatggcaagccacaaggacgatgaagaaaagttttttcctcagagcggggttctcatctttgggaagcaaggctcagagaaaacaaatgtggacattgaaaaggtcatgattacagacgaagaggaaatcaggacaaccaatcccgtggctacggagcagtacggatatgtgtcaaataatttgcaaaactcaaatactggtccaactactggaactgtcaatcaccaaggagcgttacctggtatggtgtggcaggatcgagacgtgtacctgcagggacccatttgggccaagattcctcacaccgatggacactttcatccttctccactgatgggaggttttggactcaaacacccgcctcctcagatcatgatcaaaaacactcccgttccagccaatcctcccacaaacttcagttctgccaagtttgcttcttttatcacacagtattccacggggcaggtcagcgtggagatcgagtgggagctgcagaaggagaacagcaaacgctggaatcccgagattcagtacacttccaactacaacaagtctgttaatgtggactttactgtggacactaatggcgtgtattcagagcctcgccccattggcaccagatacctgactcgtaatctgtaattgcttgttaatcaataaaccgtttaattcgtttcagttgaactttggtctctgcgtacttctttcttatctagtttccatggctacgtagataagtagcatggcgggttaatcattaactacaaggaacccctagtgatggagttggccactccctctctgcgcgctcgctcgctcactgaggccgggcgaccaaaggtcgcccgacgcccgggctttgcccgggcggcctcagtgagcgagcgagcgcgcagagagggagtggccaa

SEQ ID NO: 92 - DNA, 4679 bp, adeno-associated virus 2
ttggccactccctctctgcgcgctcgctcgctcactgaggccgggcgaccaaaggtcgagagagctgcccgcctcggctctccggcctcagtgagcgagcgagcgcgcagagagggagtggccaactccatcactaggggttcctggaggggtggagtcgtgacgtgaagtacgtcatagggttagggaggtcctgtattagaggtcacgtgagtgttttgcgacattttgcgacaccatgtggttacgcagggtatttaagcccgagtgagcacgcagggtctccattttgaagcgggaggtttgaacgcgcagccgccatgccggggttttacgagattgtgattaaggtccccagcgaccttgacgagcatctgcccggcatttctgacagctttgtgaactgggtggccgagaaggaatgggagttgccgccagattctgacatggatctgaatctgattgagaaggcacccctgaccgtggccgagaagctgcagcgcgactttctgacggagtggcgccgtgtgagtaaggctccggaggcccttttctttgtgcaatttgagaagggagagagctacttccacatgcacgtgcttgtggagaccactggggtgaaatccatggttttgggacgtttcctgagtcagattcgcgaaaaactgattcagagaatttaccgcgggatcgagccgactttgccaaactggttcgcggtcacgcagaccctccatgccgccgcaggcgggaacacagtggtggatgagtgctacatccccaattacctgctccccaaaacccagcctgagctccagtgggcgtggactaatatggaacagtatttaagcgcctgtttgaatctcgcggagcgtaaacggttggtggcgcagcatctgacgcacgtgtcgcagacgcaggagcagaacaaagagaatcagaatcccaattctgacgcgccggtgattagatcaaaaacctcagccaggtacatggagctggtcgggtggctcgtggataaggggatcacctcggagaagcagtggatccaggaggaccaggcctcatacatctccttcaatgcggcctccaactcgcggtcccagatcaaggctgccbtggacaatgcgggaaagatcatgagcctractaaaaccgcccccgactacctggtgggccagcagcccgtggaggacatttccagcaatcggatttataaaattttggaactcaacgggtacgatccccaatatgcggcttccgtctttctgggatgggccacgaaaaagttcggcaagaggaacaccatctggctgtttgggcctgcaactaccgggaagaccaacatcgcggaggccatagcccacactgtgcccttctacgggtgcgtaaactggaccaatgagaactttcccttcaacgactgtgtcgacaagatggtgatctggtgggaggagggaaagatgaccgccaaggtcgtggagtccgccaaagccattctcggaggaagcaagatgcgcgtggaccagaaatgcaagtcctcggcccagatagacccgactcccgtgatcgtcacctccaacaccaacatgtgcgccgtgattgacgggaactcaacgaccttcgaacaccagcagccgttgcaagaccggatgttcaaatttgaactcacccgccgtctggatcatgactttgggaaggtcaccaagcaggaagtcaaagactttttccggtgggcaaaggatcacgtggttgaggtggagcatgaattctacgtcaaaaagggtggagccaaaaaaagacccgcccccagtgacgcagatataagtgagcccaaacgggcgcgcgagkcagttgcgcagccatcgacgtcagacgcggaagcttcgatcaactacgcggacaggtaccaaaacaaatgttctcgtcacgtgggcatgaatctgatgctgtttccctgcagacaatgcgagagaatgaatcagaattcaaatatttgcttcactcacggacagaaagactgtttagagtgctttcccgtgtcagaatctcaacccgtttctgtcgtcaaaaaggcgtatcagaaactttgctacattcatcatatcatgggaaaggtgccagacgcttgcactgcctgcgatctggtcaatgtggatttggatgactgcatctctgaacaataaatgatttaaatcaggtatggctgccgatggttatcttccagattggctcgaggacactctctctgaaggaataagacagtggtggaagctcaaacctggcccaccaccaccaaagcccgcagagcggcataaggacgacagcaggggtcttgtgcttcctgggtacaagtacctcggacccttcaacggactcgacaagggagagccggtcaacgaggcagacgccgcggccctcgagcacgacaaagcctacgaccggcagctcgacagcggagacaacccgtacctcaagtacaaccacgccgacgcggagtttcaggagcgccttaaagaagatacgtcttttgggggcaacctcggacgagcagtcttccaggcgaaaaagagggttcttgaacctctgggcctggttgaggaacctgttaagacggctcctggaaaaaagaggccggtagagcactctcctgtggagccagactcctcctcgggaaccggaaaagcgggccagcagcctgcaagaaaaagattgaatttcggtcagactggagacgcagactccgtacctgacccccagcctctcggacagccaccagcagccccctctggtctgggaactaatacgatggctacaggcagtggcgcaccaatggaagacaataacgagggtgccgatggagtgggtaattcctcaggaaattggcattgcgattcccaatggctgggcgacagagtcatcaccaccagcacccgaacctgggccctgcccacctacaacaaccacctctacaagcaaatttgcagccaatcaggagcctcaaacgacaaccactactttggctacagcacccggtggggggattttgacttcaacagattccactgccacttttcaccacgtgactggcaaagactcatcaacaacaactggggattccggcccaaaagactcaacttcaagctctttaacattcaagtcaaagaggtcacgcagaatgacggtacgamgacgattgccaataaccttaccagcacggttcaggtgtttactgactcggagtaccagctcccgtacgtcctcggctcggcgcatcaaggatgcctcccgccgttcccagcggacgtcttcatggttccacagtatggatacctcaccctgaacaacgggagtcaggcggtaggacgctcttccttttactgcctggagtactttccttctcagatgctgcgtaccggaaacaactttaccttcagctacacctttgaagacgttcctttccacagcagctacgctcacagccagagtctggatcggctgatgaatcctctgatcgaccagtacctgtattacttgagcagaacaaacactccaagtggaaccaccacgcagtctcggctactgtttagtcaagctggacccaccagcatgtctcttcaagctaaaaactggctgcctggaccttgctacagacagcagcgtctgtcaaagcaggcaaacgacaacaacaacagcaactttccctggactgcggctacaaagtatcatctaaatggccgggactcgttggttaatccaggaccagctatggccagccacaaggacgatgaagaaaagttttttcctcagagcggggttctcatctttgggaagcaaggctcagagaaaacaaatgtggacattgaaaaggtcatgattacagacgaagaggaaatcaggacaaccaatcccgtggctacggagcagtacggatatgtgtcaaataatttgcaaaactcaaatactggtccaactactggaactgtcaatcaccaaggagcgttacctggtatggtgtggcaggatcgagacgtgtacctgcagggacccatttgggccaagattcctcacaccgatggacactttcatccttctcccctcatgggtggattcggacttaaacaccctcctccacagatcatgatcaaaagctctsccgttccagccaatcctcctacaaacttcagttctgccaagtttgcttctttcatcacacagtactccacggggcaggtcagcgtggagatcgagtgggagctgcagaaggagaacagcaaacgctggaatcccgagattcagtacacttcaaactacaacaagtctgttaatgtggactttactgtggacactaatggtgtgtattcagagcctcgccccattggcaccagatacctgactcgtaatctgtaattgcttgttaatcaataaaccgtttaattcgtttcagttgaactttggtctccgcgtacttctttcttatctagtttccatggctacgtagataagtagcatggcgggttaatcattaactacaaggaacccctagtgatggagttggccactccctctctgcgcgctcgctcgctcactgaggccgggcgaccaaaggtcgcccgacgcccgggctttgcccgggcggcctcagtgagcgagcgagcgcgcagagagggagtggccaa

SEQ ID NO: 93 - DNA, 4679 bp, adeno-associated virus 2
ttggccactccctctctgcgcgctcgctcgctcactgaggccgggcgaccaaaggtcgcccgacgcccgggctttgcccgggcggcctcagtgagcgagcgagcgcgcagagagggagtggccaactccatcactaggggttcctggaggggtggagtcgtgacgtgaattacgtcatagggttagggaggtcctgtattagaggtcacgtgagtgttttgcgacattttgcgacaccatgtggtcacgctgggtatttaagcccgagtgagcacgcagggtctccattttgaagcgggaggtttgaacgcgcagccgccatgccggggttttacgagattgtgattaaggtccccagcgaccttgacgttgtccagagcagccttgatttgggaccgcggaagttggaggccgagaaggaatgggagttgccgccagattctgacatggatctgaatctgattgagcaggcacccctgaccgtggccgagaagctgcagcgcgactttctgacggartggcgccgcgtgagtaaggccccggaggccctcttctttgtgcaatttgagaagggagagagctacttccacatgcacgtgctcgtggaaaccaccggggtgaaatccatggttttgggacgtttcctgagtcagattcgcgaaaaactgattcagagaatttaccgcgggatcgagccgactttgccaaactggttcgcggtcacaaagaccagaaatggcgccggaggcgggaacaaggtggtggatgagtgctacatccccaattacctgctccccaaaacccagcctgagctccagtgggcgtggactaatatggaacagtatttaagcgcctgtttgaatctcgctgagcgtaaacggttggtggcgcagcatctgacgcacgtgtcgcagacgcaggagcagaacaaagagaatcagaatcccaattctgatgcgccggtgatcagatcaaaaacttcagccaggtacatggagctggtcgggtggctcgtggacaaggggattacctcggagaagcagtggatccaggaggaccaggcctcatacatctccttcaatgcggcctccaactcgcggtcccaaatcaaggctgctctggacaatgcgggaaagatcatgagcctgactaaaaccgccccagactacctagtgggccagcagcccgtggaggacatttccagcaatcggatttataaaattttggaactaaacgggtacgatccccaatacgcggcttccgtctttctgggatgggccacgaaaaagttcggcaagaggaacaccatctggctgtttgggcctgcaactaccgggaagaccaacatcgcggaggccatagcccacactgtgcccttctacgggtgcgtaaactggaccaatgagaactttcccttcaatgactgcgtcgacaagatggtgatctggtgggaggaggggaagatgaccgccaaggtcgtagagtcggccaaagccattctcggaggaagcaaggtgcgcgtggaccagaaatgcaagtcctcggcccagatagacccgactcccgtgatcgtcacctccaacaccaacatgtgcgccgtgattgacgggaactcaacgaccttcgaacaccagcagccgttgcaagaccggatgttcaaatttgaactcacccgccgtctggatcatgactttgggaaggtcacaaagcaggaagtcaaagactttttccggtgggcaaaggatcacgtggttgaggtggagcatgaattctacgtcaaaaagggtggagcyaagaaaaggcccgcccccagtgacgcagatataagtgagcccaaacgggcgcgcgagtcagttgcgcagccatcgacgtcagacgcggaagcttcratcaactacgcagacaggtaccaaaacaaatgttctcgtcacgtgggcatgaatctgatgctgtttccctgcagacaatgcgagagaatgaatcagaattcaaatatctgcttcactcacggacagaaagactgtttagagtgctttcccgtgtcagaatctcaacccgtttctgtcgtcaaaaaggcgtatcagaaactgtgctacattcatcatatcatgggaaaggtgccagacgcttgcactgcctgcgacctggtcaatgtggatttggatgactgcatctctgaacaataaatgatttaaatcaggtatggctgccgatggttatcttccagattggctcgaggacactctctctgaaggaataagacagtggtggaagctcaaacctggcccaccaccaccaaagcccgcagagcggcataaggacaacagcaggggtcttgtgcttcctgggtacaagtacctcggacccttcaacggactcgacaagggagagccggtcaacgaggcagacgccgcggccctcgaacacgacaaggcctacgaccggcagctcgacagcggagacaacccgtacctcaagtacaaccacgccgacgcggagtttcaggagcgtcttaaagaagatacgtcttttgggggcaacctcggacgagcagtcttccaggcgaaaaagagggttcttgaacctctgggcctggttgaggagcctgttaagacggctccgggaaaaaagaggccggtagagcactctcctgtggagccagactcctcctcgggaaccggaaaagcgggccaacagcctgcgaaaaaaagactgaagtttggtcagactggagacgcagactccgtacctgacccccagcctctcggacagccaccagcagccccctctggtctgggatctactacaatggctacaggcagtggcgcaccaatggcagacaataacgagggtgccgatggagtgggtaattcctcgggaaattggcattgcgattccacatggatgggcgacagagtcatcaccaccagcacccgaacctgggccctgcccacctacaacaaccacctctacaaacaaatttccagccaatcaggagcctcgaacgacaatcactactttggctacagcaccccctgggggtattttgacttcaacagattccactgccacttttcaccacgtgactggcaaagactcatcaacaacaactggggattccgacccaaaagactcaacttcaagctctttaacattcaagtcaaagaggtcacgcagaatgacggtacgacgacgattgccaataaccttaccagcacggttcaggtgtttactgactcggagtaccagctcccgtacgtcctcggctcggcgcatcaaggatgcctcccgccgttcccagcggacgtcttcatggtcccacagtatggatacctcaccctgaacaacgggagtcaggcggtaggacgctcttcattttactgcctggagtactttccttctcagatgctgcgtaccggaaacaactttaccttcagctacacttttgaggacgttcctttccacagcagctacgctcacagccagagtctggaccgtctcatgaatcctctcattgaccagtacctgtattatctgaacaagacacaatcaaatagtgaaacaactttcagttcagctacacctttgaagacgttcctttccacagcagctacgctcacagccagagtctggctgcctggaccttgctacagacagcagcgtttatcaaagcaggcaaacgacaacaataacagcaactttccctggactgcagctacaaagtatcatctaaatggccgggactcgttggttaatccaggaccagctatggccagtcataaagacgatgaagaaaagtttttccctcagagcggggttctcatctttggraaacaaggctcagaraaaaccaatgtggacattgaaaaggtcatgattacagacgaagaggaaatcaggaccaccaatcccgtggctacggagcagtacggatatgtgtcaaataatttgcaaaactcaaatactggtccaactactggaactgtcaatcaccaaggagcgttacctggtatggtgtggcaggatcgagacgtgtacctgcagggacccatatgggccaagattcctcacaccgatggacactttcatccttctccgctgatgggaggttttggacttaaacaccctcctccacagatcatgatcaaaaacactcccgttccagccaatcctccyacaaacttcagttctgccaagtttgcttctttcatcacacagtattccacggggcaggtcagagtggagatcgagtgggagctgcagaaggaaaacagcaaacgctggaatcccgagatccagtacacttccaactacaacaartstgttaatgtggactttactgtggacactaatggtgtgtattcagagcytcgccccattsgcaccagatmcctgactcgtaatctgtaattgcttgttaatcaataaaccgtttaattcgtttcagttgaactttggtctctgcgtatttttttcttatctagtttccatggctacgtagataagtagcatggcgagttaatcattaactctaaggaacccctagtgatggagttggccactccctctctgcgcgctcgctcgctcactgaggccgggcgaccaaaggtcgcccgacgcccgggctttgcccgggcggcctcagtgagcgagcgagcgcgcagagagggagtggccaa

SEQ ID NO: 94 - DNA, 4681 bp, adeno-associated virus 2
ttggccactccctctctgcgcgctctgagacggagttttgcttttgttgcccaggctggagtgctatggcgcgttgcccgggcggcctcagtgagcgagcgagcgcgcagagagggagtggccaactccatcactaggggttcctggaggggtggagtcgtgacgtgaagtacgtcatagggttagggaggtcctgtattagaggtcacgtgagtgttttgcgacattttgcgacaccatgtggtcacgctgggtatttaagcccgagtgagcacgcagggtctccattttgaagcgggaggtttgaacgcgcagccgccatgccggggttttacgagattgtgattaaggtccccagcgaccttgacgagcatctgcccggcatttctgacagctttgtgaactgggtggccgagaaggaatgggagttgccgccagattctgacatggatctgaatctgattgagcaggcacccctgaccgtggccgagaagctgcagcgcgactttttgacggagtggcgccgcgtgagtaaggccccggaggcccttttctttgtgcaatttgagaagggagagagctacttccacatgcacgtgctcgtggaaaccaccggggtgaaatccatggttttgggacgtttcctgagtcagattcgcgaaaaactgattcagagaatttaccgcgggatcgagccgactttgccaaactggttcgcggtcacaaagacccgaaatggcgccggaggcgggaacaaggtggtggatgagtgctacatccccaattacctgctccccaaaacccagcctgagctccagtgggcgtggactaatatggaacagtatttaagcgcctgtttgaatctcgcggagcgtaaacggttggtggcgcagcatctgacgcacgtgtcgcagacgcaggagcagaacaaagagaatcagaatcccaattctgatgcgccggtgatcagatcaaaaacttcagccaggtacatggagctggtcgggtggctcgtggataaggggattacctcggagaagcagtggatccaggaggaccaggcctcatacatctccttcaatgcggcctccaactcgcggtcccagatcaaggctgccttggacaatgcgggaaagattatgagcctcactaaaaccgcccccgactacctggtgggccagtctctctctctgcacagcctttagtacaagttaaagtaaaatcttggaactgaacgggtacgatccccaatatgcggcttccgtctttctgggatgggccacgaaaaagttcggcaagaggaacactatctggctgtttgggcctgcaactaccgggaagaccaacatcgcggaggccatagcccacactgtgcccttctacgggtgcgtaaactggaccaatgagaactttccattcaacgactgtgtcgacaagatggtgatctggtgggaggaggggaaaatgaccgccaaggttgtggagtcggccaaagccattctcggaggaagcaaggtgcgcgtggaccagaaatgcaagtcctcggcccagatagacccgactcctgtgattgtcacctccaacaccaacatgtgcgccgtgattgacgggaactcaacgaccttcgagcaccagcagccgttgcaagaccggatgttcaaatttgaactcacccgccgtctggatcatgactttgggaaggtcaccaagcaggaagtcaaagactttttccggtgggcaaaggatcacgtggttgaggtggagcatgaattctacgtcaaaaagggtggagccaagaaaagacccgcccccagtgacgcagatataagtgagcccaaacgggcgcgcgagtcagttgcgcagccatcgacgtcagacgcggaagcttcgatcaactacgcggacaggtaccaaaacaaatgttctcgtcacgtgggcatgaatctgatgctgtttccctgcagacaatgcgagagaatgaatcagaattcaaatatctgcttcactcacggacagaaagactgtttagagtgctttcccgtgtcagaatctcaacccgtttctgtcgtcaaaaaggcgtatcagaaactttgctacattcatcatatcatgggaaaggtgccagacgcttgcactgcctgcgatctggtcaatgtggatttggatgactgcatctctgaacaataaatgatttaaatcaggtatggctgccgatggttatcttccagattggctcgaggacactctctctgaaggaataagacagtggtggaagctcaaacctggcccaccaccaccaaagcccgcagagcggcataaggacgacagcaggggtcttgtgcttcctgggtacaagtacctcggacccttcaacggactcgacaagggagagccggtcaacgaggcagacgccgcggccctcgagcacgacaaggcctacgaccggcagctcgacagcggagacaacccgtacctcaagtacaaccacgccgacgcggagtttcaggagcgtcttaaagaagatacgtcttttgggggcaacctcggacgagcagtcttccaggcgaaaaagagggttcttgaacctctgggcctggttgaggaacctgttaagacggctccgggaaaaaagaggccggtagagcactctcctgtggagccagactcctcctcgggaaccggaaaagcgggccagcagcctgcaagaaaaagattgaattttggtcagactggagacgcagactccgtacctgacccccagcctctcggacagccaccagcagccccctctggtttgggatctactacaatggctacaggcagtggcgcaccagtggcagacaataacgagggtgccgatggagtgggtaattcctcaggaaattggcattgcgattcccaatggctgggcgacagagtcatcaccaccagcacccgaacctgggccctgcccacctacaacaaccacctctacaagcaaatctccagccaatcaggagcctcaaacgacaaccactactttggctacagcaccccctgggggtattttgacttcaacagattccactgccacttttcaccacgtgactggcaaagactcatcaacaacaactggggattccgacccaagagactcaacttcaagctctttaacattcaagtcaaagaggtcacgcagaatgacggtacgaagacccccgccaataaccttaccagcacggttcaggtgtttactgactcggagtaccagctcccgtacgtcctcggctcggcgcaccaaggatgcctcccgccgttcccagcggacgtcttcatggtcccacagtatggatacctcaccctgaacaacgggagtcaggcggtaggacgctcttccttttactgcctggagtactttccttctcagatgctgcgtaccggaaacaactttaccttcagctacacttttgaagacgttcctttccacagcagctacgctcacagccagagtctggatcggctgatgaatcctctgatcgaccagtacctgtattatctgaacaaaacacaatcaaatagtggaactaacacgcagtcaaggcttcagttttctcaggccggagcgagtgacattcgggaccagtctaggaactggctgcctggaccttgctacagacagcagcgtctgtcaaagcaggcaaacgacaacaacaacagcaactttccctggacaggagctaccaagtaccacctcaatggcagagactctctggtgaatccgggcccagctatggccagccacaaagacgatgaagaaaagtttttccccatgcatggaaccctgatatttggtaaacaaggaacaaatgctaacgacgcagatttggacaatgtcatgattacagatgaagaagaaatccgcaccaccaatcccgtggctacggagcagtacggatatgtgtcaaataatttgcaaaactcaaatactggtccaactactggaactgtcaatcaccaaggagcgttacctggtatggtgtggcaggatcgagacgtgtacctgcagggacccatttgggccaagattcctcacaccgatggacactttcatccttctccactgatgggaggttttgggctcaaacacccgcctcctcagatcatgatcaaaaacactcccgttccagccaatcctcctacaaacttcagttctgccaagtttgcttctttcatcacacagtactccacggggcaggtcagcgtggagatcgagtgggagctgcagaaggagaacagcaaacgctggaatcccgaaattcagtacacttccaactacaacaaatctgttaatgtggactttactgtggacactaatggtgtgtattcagagcctcgccccattggcaccagatacctgactcgtaatctgtaattgcttgttaatcaataaaccgtttaattcgtttcagttgaactttggtctctgcgtacttcttttcttatctagtttccatggctacgtagataagtagcatggcgggttaatcattaactacaaggaacccctagtgatggagttggccactccctctctgcgcgctcgctcgctcactgaggccgggcgaccaaaggtcgcccgacgcccgggctttgcccgggcggcctcagtgagcgagcgagcgcgcagagagggagtggccaa

SEQ ID NO: 95 - DNA, 4671 bp, adeno-associated virus 2
ttggccactccctctctgcgcgctcgctcgctcactgaggccgggcgaccaaaggtcgcccgacgcccgggctttgcccgggcggcctcagtgagcgagcgagcgcgcagagagggagtggccaactccatcactaggggttcctggaggggtggagtcgtgacgtgaagtacgtcatagggttagggaggtcctgtattagaggtcacgtgagtgttttgcgacattttgcgacaccatgtggttacgcagggtatttaagcccgagtgagcacgcagggtctccattttgaagcgggaggtttgaacgcgcagccgccatgccgggattttacgagattgtgattaaggtccccagcgaccttgacgagcatttgcccggcatttctgacagctttgtgaactgggtggccgagaaggaatgggagttgccgccagattctgacatggatctgaatctgattgagcaggcacccctgaccgtggccgagaagctgcagcgcgactttctgacggagtggcgccgtgtgagtaaggctccggaggcccttttctttgtgcaatttgagaagggagagagctacttccacatgcacgtgcttgtggagaccactggggtgaaatccatggttttgggacgtttcctgagtcagattcgcgaaaaactgattcagagaatttaccgcgggatcgagccgactttgccaaactggttcgcggtcacaaagacccgaaatggcgccggaggcgggaacaaggtggtggatgagtgctacatccccaattacctgctccccaaaacccagcctgagctccagtgggcgtggactaatatggaacagtatttaagcgcctgtttgaatctcgcggagcgtaaacggttggtggcgcagcatctgacgcacgtgtcgcagacgcaggagcagagcaaagaaaatcagaatcccaattctgacgcgccggtgattagatcaaaaacctcagccaggtacatggagctggtcgggtggctcgtggataaggggatcacctcggagaagcagtggatccaggaggaccaggcctcatacatctccttcaatgcggcctccaactcgcggtcccagatcaaggctgccttggacaatgcgggaaagatcatgagcctgactaaaaccgcccccgactacctggtgggccagcagcccgtggaggacatttccagcaatcggatttataaaattttggaactcaacgggtacgatccccaatatgcggcttccgtctttctgggatgggccacgaaaaagttcggcaagaggaacaccatctggctgtttgggcctgcaactaccgggaagaccaacatcgcggaagccatagcccacactgtgcccttctacgggtgcgtaaactggaccaatgagaactttcccttcaacgactgtgtcgacaagatggtgatctggtgggaggagggaaagatgaccgccaaggtcgtggagtcggccaaagccattctcggaggaagcaaggtgcgcgtggaccagaaatgcaagtcctcggcccagatagacccgactcccgtgatcgtcacctccaacaccaacatgtgcgccgtgattgacgggaactcaacgaccttcgaacaccagcagccgttgcaagaccggatgttcaaatttgaactcacccgccgtctggatcatgactttgggaaggtcaccaagcaggaagtcaaagactttttccggtgggcaaaggatcacgtggttgaggtggagcatgaattctacgtcaaaaagggtggagccaaaaaaagacccgcccccagtgacgcagatataagtgagcccaaacgggcgcgcgagtcagttgcgcagccatcgacgtcagacgcggaagcttcgatcaactacgcggacaggtaccaaaacaaatgttctcgtcacgtgggcatgaatctgatgctgtttccctgcagacaatgcgagagaatgaatcagaattcaaatatttgcttcactcacggacagaaagactgtttagagtgctttcccgtgtcagaatctcaacccgtttctgtcgtcaaaaaggcgtatcagaaactttgctacattcatcatatcatgggaaaggtgccagacgcttgcactgcctgcgatctggtcaatgtggatttggatgactgcatctctgaacaataaatgatttaaatcaggtatggctgccgatggttatcttccagattggctcgaggacactctctctgaaggaataagacagtggtggaagctcaaacctggcccaccaccaccaaagcccgcagagcggcataaagacgacagcaggggtcttgtgcttcctgggtacaagtacctcggacccttcaacggactcgacaagggagagccggtcaacgaggcagacgccgcggccctcgagcacgacaaggcctacgaccggcaactcgacagcggagacaacccgtacctcaagtacaaccacgccgacgcggaatttcaggagcgccttaaagaagatacgtcttttgggggcaacctcggacgagcagtcttccaggcaaaaaagagggttcttgaacctctgggcctggttgaggaacctgttaagacggctcctggaaaaaagaggccggtagagcactctcctgcggagccagactcctcctcgggaaccggaaaagcgggccagcagcctgcaagaaaaagattgaatttcggtcagactggagacgcagactccgtacctgacccccagcctctcggacagccaccagcagccccctctggtttgggatctactacaatggctacaggcagtggcgcaccagtggcagacaataacgagggtgccgatggagtgggtaattcctcaggaaattggcattgcgattcccaatggctgggcgacagagtcatcaccaccagcacccgaacctgggccctgcccacctacaacaaccacctctacaagcaaatttccagccaatcaggagcctcgaaccactactttggctacagcaccccctgggggtattttgacttcaacagattccactgccacttttcaccacgtgattggcaaagactcatcaacaacaactggggattccgacccaagagactcaacttcaagctctttaacattcaagtcaaagaggtcacgcagaatgacggtacgacgacgattgccaataaccttaccagcacggttcaggtgtttactgactcggagtaccagctcccgtacgtcctcggctcggcgcatcaaggatgcctcccgccgttcccagcggacgtcttcatggttccacagtatggatacctcaccctgaacaacgggagtcaggcggtaggacgctcttccttttactgcctggagtactttccttctcagatgctgcgtaccggaaacaactttaccttcagctacacttttgaggacgttcctttccacagcagctacgctcacagccagagtctggatcggctgatgaatcctctgatcgaccagtacctgtattatctgaacaaaacacaatctagtggaactcttcagcagtctcggttactgtttagtcaagctggacccaccagcatgtctcttcaagctaggaactggcttcctggaccctgttaccgccagcagcgagtatcaaagacatctgcggataaaaacaacagtgaatactcgtggactgcggctacaaagtatcatctaaatggccgggactcgttggttaatccaggaccagctatggccagccacaaagacgatgaagaaaagtttttccccatgcctggaaccctgatatttggtaaagaaggaacaaatgctaacaacgcagaattggaaaatgtcatgattacagatgaagaagaaatccgcaccaccaatcccgtggctacggagcagtacggatatgtgtcaaataatttgcaaaactcaaatactggtccaactactggaactgtcaatcaccaaggagcgttacctggtatggtgtggcaggatcgagacgtgtacctgcagggacccatttgggccaagattcctcacaccgatggacactttcatccttctccactgatgggaggttttgggctcaaacacccacctcctcagatcatgatcaaaaacactcccgttccagccaatcctcctacaaacttcagtgcggcaaaatttgcttcctttatcacacagtattccacggggcaggtcagcgtggaaatcgagtgggagctgcagaaggagaacagcaaacgctggaatcccgagatccagtacacttccaactacaacaagtctgttaatgtggactttactgtggacactaatggcgtgtattcagagcctcgccccattggcaccagatacctgactcgtaatctgtaattgcttgttaatcaataaaccgtttaattcgtttcagttgaactttggtctctgcgtacttcttttcttatctagtttccatggctacgtagataagtagcatggagggttaatcattaactacaaggaacccctagtgatggagttggccactccctctctgcgcgctcgctcgctcactgaggccgggcgaccaaaggtcgcccgacgcccgggctttgcccgggcggcctcagtgagcgagcgagcgcgcagagagggagtggccaa

SEQ ID NO: 96 - DNA, 4679 bp, adeno-associated virus 2
ttggccactccctctctgcgcgctcgctcgctcactgaggccgggcgaccaaaggtcgcccgacgcccgggctttatacgggcggcctcagtgagcgagcgagcgcgcagagagggagtggccaactccatcactaggggttcctggaggggtggagtcgtgacgtgaagtacgtcatagggttagggaggtcctgtattagaggtcacgtgagtgttttgcgacattttgcgacaccatgtggttacgctgggtatttaagcccgagtgagcacgcagggtctccattttgaagcgggaggtttgaacgcgcagccgccatgccggggttttacgagattgtgattaaggtccctagcgaccttgacgagcatttgcccggcatttctgacagctttgtgaactgggtggccgagaaggaatgggagttgccgccagattctgacatggatctgaatctgattgagcaggcacccctgaccgtggccgagaagctgcagcgcgactttctgacggaatggcgccgtgtgagtaaggccacggaggccctcttctttgtgcaatttgagaagggagagagctacttccacatgcacgtgctggtggagaccaccggggtgaaatccatggttttgggacgtttcctgagtcagattcgcgaaaaactgattcagagaatttaccgcgggatcgagccgactttgccaaactggttcgcggttacaaagacccgaaatggcgccggaggcgggaacaaggtggtggatgagtgctacatccccaattacctgctccccaaaacccagcctgagctccagtgggcgtggactaatatggaacagtatttaagcgcctgtttgaatctcgcggagcgtaaacggttggtggcgcagcatctgacgcacgtgtcgcagacgcaggagcagaacaaagagaatcagaatcccaattctgacgcgccggtgattagatcaaaaacctcagccaggtacatggagcttgtcgggtggctcgtggataaggggattacctcggagaagcagtggattcaggaggaccaggcctcatacatctccttcaatgcggcctccaactcgcggtcgcaaatcaaggctgctctggacaatgcgggaaagatcatgagcctgactaaaaccgcccccgactacctggtgggccagcagcccgtggaggacatttccagcaatcggatttataagatcttggaactgaacgggtacgatccccaatacgcggcttccgtatttctgggatgggccacgaaaaagttcggcaagagraacaccatctggctgtttgggcctgcaactaccgggaagaccaacatcgcggaggccatagcccacactgtgcccttctacgggtgcgtaaactggaccaatgagaactttcctttcaacgactgtgttgacaagatggtgatctggtgggaggaggggaagatgaccgccaaggttgtggagtcggccaaagccattctcggaggaagcaaggtgcgcgtggaccagaaatgcaagtcctcggcccagatagacccgactcccgtgatcgtcacctccaacaccaacatgtgcgccgtgccagacgcttgcacaacgaccttcgaacaccagcagccgttgcaagaccggatgttcaaatttgaactcacccgccgtctggatcatgactttgggaaggtcaccaagcaggaagtgaaagactttttccggtgggcaaaggatcacgtggttgaggtggagcatgaattctacgtcaaaaagggtggagccaaaaaaagacccgcccccagtgacgcagatataagtgagcccaaacgggcgcgcgagtcagttgcgcagccatcgacgtcagacgcggaagcttcaatcaactacgcggacaggtaccaaaacaaatgttctcgtcacgtgggcatgaatctgatgctgtttccctgcagacaatgcgaaagaatgaatcagaattcaaatatctgcttcactcacggacagaaagactgtttagagtgctttcccgtgtcagaatctcaacccgtttctgtcgtcaaaaaggcgtatcagaaactttgctacattcatcatatcatgggaaaggtgccagacgcttgcactgcctgcgatctggtcaatgtggatttggatgactgcatctctgaacaataaatgatttaaatcaggtatggctgccgatggttatcttccagattggctcgaggacactctctctgaaggaataagacagtggtggaagctcaaacctggcccaccaccaccaaagcccgcagagcggcataaggacgacagcaggggtcttgtgcttcctgggtacaagtacctcggacccttcaacggactcgacaagggagagccggtcaacgaggcagacgccgcggccctcgagcacgacaaggcctacgaccggcagctcgacagcggagacaacccgtacctcaagtacaaccacgccgacgcggagtttcaggagcgtcttaaagaagatacgtcttttgggggcaacctcggacgagcagtcttccaggcgaaaaagagggttcttgaacctctgggcctggttgaggaacctgttaagacggctccgggaaaaaagaggccggtagagcactctcctgcggagccagactcctcctcgggaaccggaaaagcgggccagcagcctgcaagaaaaagattgaattttggtcagactggagacgcagactccgtacctgacccccagcctctcggacagccaccagcagccccctctggtttgggatctactacaatggctacaggcagtggcgcaccagtggcagacaataacgagggtgccgatggagtgggtaattcctcaggaaattggcattgcgattcccaatggttgggcgacagagtcatcaccaccagcacccgaacctgggccctgcccacctacaacaaccacctctacaagcaaatctccagccaatcaggagcctcaaacgacaaccactactttggctacagcaccccttgggggtattttgacttcaacagattccactgccacttttcaccacgtgactggcaaagactcatcaacaacaactggggattccgacccaagagactcaacttcaagctctttaacattcaagtcaaagaggtcacgcagaatgacggtacgacgacgattgccaataaccttaccagcacggttcaggtgtttactgactcggagtaccagctcccgtacgtcctcggctcggcgcatcaaggatgcctcccgccgtttccagcggacgtcttcatggtgccacagtatggatacctcaccctgaacaacgggagtcaggcggtaggacgctcttccttttactgcctggagtactttccttctcagatgctgcgtactggaaacaactttcagttcagctacacctttgargacgttcctttccacagcagctacgctcacagccagagtctggatcggctgatgaatcctctgattgaccagtacctgtattatctgaacaagacacaatcaaatagtggaactcttcagcagtctcggctactgtttagtcaagctggagcgagtgacattcgggaccagtctaggaactggcttcctggaccctgttaccgccagcagcgagtatcaaagacatctgcggataacaacaacagcaactttccctggactgcggctacaaagtatcatctaaatggccgggactcgttggttaatccaggaccagctatggccagccacaaagacgatgaagaaaagtttttccccatgcatggaaccctgatatttggtaaacaaggaacaaatgctaacgacgcggatttggacaatgttatgattacagatgaagaagaaatccgcaccaccaatcccgtggctacggagcagtacggatatgtgtcaaataatttgcaaaactcaaatactggtccaactactggaactgtcaatcaccaaggagcgttacctggtatggtgtggcaggatcgagacgtgtacctgcagggacccatttgggccaagattcctcacaccgatggacactttcatccttctccactgatgggaggttttgggctcaaacacccgcctcctcagatcatgatcaaaaacactcccgttccagccaatcctcctacaaacttcagttctgccaagtttgcttctttcatcacacagtattccacgggacaggtcagcgtggagatcgagtgggagctgcagaaggagaacagcaaacgctggaatcccgaaattcagtacacttccaactacaacaaatctgttaatgtggactttactgtggacactaatggtgtgtattcagagcctcgccccattggcaccagatacctgactcgtaatctgtaattgcttgttaatcaataaaccgtttaattcgtttcagttgaactttggtctttgcgtacttctttcttatctagtttccatggctacgtagataagtagcatggcgggttaatcattaactacaaggaacccctagtgatggagttggccactccctctctacgcgctcgctcgctcactgaggccgggcgaccaaaggtcgcccgacgcccgggctttgcccgggcggcctcagtgagcgagcgagcgcgcagagagggagtggccaa

SEQ ID NO: 97 - DNA, 4676 bp, adeno-associated virus 2
ttggccactccctctctgcgcgctcgctcgctcactgaggccgggcgaccaaaggtcgcccgacgcccgggctttgcccgggcggcctcagggagcgagcgagcgcgcagagagggagtggccaactccatcactaggggttcctggaggggtggagtcgtgacgtgaattacgtcatagggttagggaggtcctgtattagaggtcacgtgagtgttttgcgacattttgcgacaccatgtggttacgcagggtatttaagcccgagtgagcacgcagggtctccattttgaagcgggaggtttgaacgcgcagccgccatgccggggttttacgagattgtgattaaggtccccagcgaccttgacgagcatctgcccggcatttctgacagctttgtgaactgggtggccgagaaggaatgggagttgccgccagattctgacatggatctgaatctgattgagcaggcacccctgaccgtggccgagaagctgcagcgcgactttctgacagaatggcgccgtgtgagtaaagcccccgaggcccttttctttgtgcaatttgagaagggagagagctacttccacatgcacgtgctcgtggaaaccacgggggtgaaatccatggttttgggacgtttcctgagtcagattcgcgaaaaactgattcagagaatttatcgcgggatcgagccgactttgccaaactggttcgcggtcacaaagacccgaaatggcgccggaggcgggaataaggtggtggatgagtgctacatccccaattacctgctccccaaaacccaacctgagctccagtgggcgtggactaatatggaacagtatttaagcgcctgtttgaatctcgcggagcgtaaacggttggtggcgcagcatctgacgcacgtgtcgcagacgcaggagcagaacaaagagaatcagaatcccaattctgacgcgccggtgatcagatcaaaaacctcagccaggtacatggagctggtcgggtggctcgtggataaggggattacctcggagaagcagtggatccaggaggaccaggcttcatacatctccttcaatgcggcctccaactcgcggtcccagatcaaggctgccttggacaatgcgggaaagatcatgagcctgactaaaaccgcccccgactacctggtgggccagcagcctgtggaggacatttccggcaatcggatttataaaatcttggaactgaacgggtacgatccccaatacgcggcttccgtctttctgggatgggccackaaaaagttcggcaagaggaacaccatctggctgtttgggcctgcaactaccgggaagaccaacatcgcggaggccatagcccacactgtgcccttctacgggtgcgtaaactggaccaatgagaactttcckttcaatgattgcgtcgacaaaatggtgatctggtgggaggagggaaagatgaccgccaaggtcgtggagtcggccaaagccattctcggaggaagcaaggtgcgcgtggaccagaaatgcaaatcctcggcccagatagacccgactcccgtgatcgtcacctccaacaccaacatgtgcgccgtgattgacgggaactcaacgaccttcgagcaccagcagccgttgcaagaccggatgttcaaacatgaactcacccgccgtctggatcatgactttgggaaggtcaccaagcaggaagtcaaacgctatttccggtgggcaaaggatcacgtggttgaggtggagcatgaattctacgtcaaaaagggtggagccaagaaaagacccgcccccagtgacgcagatataagtgagcccaaacgggcgcgcgagtcagttgcgcagccatcgacgtcagacgcggaagcttcgatcaactacgcagacaggtaccaaaacaaatgttctcgtcacgtggacatgaatctgatgctgtttccctgcagacaatgcgagagaatgaatcagaattcaaatatctgcttcactcacggacagaaagactgtttagagtgctttcccgtgtcagaatctcaacccgtttctgtcgtcaaaaaggcgtatcagaaactttgctacattcatcatatcatgggaaaggtgccagacgcttgcactgcctgcgatctggtcaatgtggatttggatgactgcatctctgaacaataaatgatttaaatcaggtatggctgccgatggttatcttccagattggctcgaggacactctctctgaaggaataagacagtggtggaagctcaaacctggcccaccaccaccaaagcccgcagagcggcataaggacgacagcaggggtcttgtgcttcctgggtacaagtacctcggacctttcaacggactcgacaagggagagccggtcaacgaggcagacgccgcggccatcgagcacgacaaggcctacgaccggcagctcgacagcggagacaacccgtacctcaagtacaaccacgccgacgcggagtttcaggagcgtcttaaagaagatacgtcttttgggggcaacctcggacgagcagtcttccaggcgaaaaagagggttcttgaacmtmtgggcctggttgaggaacctgttaagacggctccgggaaaaaagaggccagtagcgcactctcctgcggaaccagactcctcctcgggaaccggaaargcgggcaaccagcctgcaagaaagagattgaatttcggtcagactggagacgcagactccgtaccygacccccagcctctcggacagccaccagcagcccccacaagtttgggatctactacaatggctacaggcagtggcgcaccaatggcagacaataacgagggtgccgatggagtgggtaattcctcgggaaattggcattgcgattccacatggatgggcgacagagtcatcaccaccagcacccgaacctgggctctgcccacctacaacaaccacctctacaagcagatctccagccaatcaggagcttcraacgacaaccactactttggctacagcaccccctgggggtattttgacttcaacagattccactgccacttttcaccacgtgactggcaaagactcatcaacaacaactggggattccgacccaagagactcaacttcaagctctttaacattcaagtcaaagaggtcacgcagaatgacggtacgacgacgattgccaataaccttaccagcacggttcaggtgtttactgactcggagtaccagctcccgtacgtcctcggctcggcgcatcaaggatgcctcccgccgtttccagcggacgtcttcatggtcccacagtatggatacctcaccctgaacaacgggagtcaggcggtaggacgctcttccttttactgcctggagtactttccttctcaaatgctgcgtactggaaacaactttcagttcagctacacttttgaagacgtgcctttccacagcagctacgctcacagccagagtttggatcggctgatgaatcctctgatcgaccagtacctgtattatctaaacaggacacaaacagccagtggaactcagcagtctcggctactgtttagccaagctggacccaccagcatgtctcttcaagctaaaaactggctgcctggaccttgctacagacagcagcgtctgtcaaagcaggcaaacgacaacaacaacagcaactactcgtggactggagctaccaagtaccacctcaatggtagagactctttggtgwacccgggccctgctatggccagccacraagacgatgaagraaagtttttccccatgcatggaaccctgatatttggtaaagaaggaacaaatgctaccaacgcggatttggacaatgtcatgattacagacgaagaggaaatcaggacaacaaatcctgtagctacggagcagtacggatatgtgtcaaataatttgcaaaactcaaacactgctgcaactactgaaactgtcaatcaccaaggagcgttacctggtatggtgtggcaggaccgagacgtgtacctacagggacccatttgggccaagattcctcacaccgatggacactttcatccttctcccctcatgggcggattcggactcaaaaacccacctcctcagatcatgatcaaaaacactcccgttccagccaatcctcccacaaacttcagttctgccaagtttgcttctttcatcacacagtattccacggggcaggtcagcgtggagatcgagtgggagctgcagaaggagaacagcaaacgctggaatcccgagatccagtacacttccaactacaacaagtctgttaatgtggactttactgtggacactaatggtgtgtattcagagcctcgccccattggcaccagatacctgactcgtaatctgtaattgcttgttaatcaataaaccgtttaattcgtttcagttgaactttggtctccgcgtcacgactccacccctagtttccatgactacgtagataagtagcatggcgggttaatcattaactctaaggaacccctagtgatggagttggccactccctctctgcgcgctcgctcgctccctgaggccgggcgaccaaaggtcgcccgacgcccgggctttgcccgggcggcctcagtgagcgagcgagcgcgcagagagggagtggccaa

SEQ ID NO: 98 - DNA, 4676 bp, adeno-associated virus 2
ttggccactccctctctgcgcgctcgctcgctcactgaggccgggcgaccaaaggtcgcccgacgcccgggctttgcccgggcggcctcagtgagcgagcgagcgcgcagagagggagtggccaactcatcactaggggttcctggaggggtggagtcgtgacgtgaagtacgtcatagggttagggaggtcctgtattagaggtcacgtgagtgttttgcgacattttgcgacaccatgtggtcacggtgggtatttaagcccaagtgagcacgcagggtctccattttgaagcgggaggtttgaatacgcagccgccatgccggggttttacgagattgtgattaaggtcccaagcgaccttgacgagcatttgcccggcatttctgacagctttgtgaactgggtggccgagaaggaatgggagttgccgccagattctgacatggatctgaatctgattgagcaggcacccctgaccgtggccgaaaagctgcagcgcgactttctgacagaatggcgccgtgtgagtaaggcccccgaggcccttttctttgtgcaatttgagaagggagagagctatttccacatgcacgtgctcgtggagaccacgggggtaaaatccatggttttaggacgtttcctgagtcagattcgcgaaaaactgattcagagaatttaccgcgggatcgagccgactttgccaaattggtttgcggtcacaaagactcgaaatggcgccggaggcgggaacaaggtggtggatgagtgctacatccccaattacctgctccccaaaacccaacctgagctccagtgggcgtggactaatatggaacagtatttaagcgcctgtttgaacctcgcggagcgtaaacggttggtggcgcagcatctgacgcacgtgtcgcagacccaggagcagaacaaagagaatcagaatcccaattctgacgcgccggtgattagatcaaaaacctcagccaggtacatggagctggtcgggtggctcgtggataaggggattacctctgagaagcagtggattcaggaggaccaggcctcatacatctccttcaatgcggcctccaactcgcggtcccaaatcaaggctgctctggacaatgcgggaaaaatcatgagcctgactaaaacggcccccgactacctggtgggccagcagcccgtggaggacatctccggcaatcggatttataaaatcttggaaccgaacgggtacgatccccaatacgcggcttccgtctttctgggatgggccacgaaaaagttcggcaagaggaacaccatctggctgtttgggcctgcaactaccgggaagaccaacatcgcggaggccatagcccacactgtgcccttctacgggtgcgtaaactggaccaatgaaaactttcctttcaacgattgcgtcgacaagatggtgatctggtgggaggaggggaagatgaccgccaaggtcgtggagtcggccaaagccattctcggaggaagcaaggtgcgcgtggaccagaaatgcaagtcctcggcccagatcgacccgactcccgtgatcgtcacctccaacaccaacatgtgcgccgtgattgacgggaactcaacgaccttcgagcaccagcagccgttgcaagggatgttcaaatttgaacttacccgccgtctggatcatgactttgggaaggtcaccaagcaggaagtcaaagactttttccggtgggcaaaggatcacgtggttgaggtggagcatgaattctacgtcaaaaagggtggagccaagaaaagacccgcccccagtgacgcagatataagtgagcccaaacgggcgcgcgagtcagttgcgcagccatcgacgtcagacgcggaagcttcgatcaactacgcggacaggtaccaaaacaaatgttctcgtcacgtgggcatgaatctgatgctgtttccctgcagacaatgcgagagaatgaatcagaattcaaatatctgctttactcacggacagaaagactgtttagagtgctttcccgtgtcagaatctcaacccgtttctgtcgtcaaaaaggcgtatcagaaactttgctacattcatcatatcatgggaaaggtgccagacgcttgcactgcttgcgacctggtcaatgtggatttggatgactgcatctctgaacaataaatgatttaaatcaggtatggctgccgatggttatcttccagattggctcgaggacactctctctgaaggaataagacagtggtggaagctcaaacctggcccaccaccaccaaagcccgcagagcggcataaggacgacagcaggggtcttgtgcttcctgggtacaagtacctcggacccttcaacggactcgacaaaggagagccggtcaacgaggcagacgccgcggccctcgagcacgacaaggcctacgaccggcagctcgacagcggagacaacccgtacctcaagtacaaccacgccgacgcggagttccaggagcgccttaaagaagatacgtcttttgggggcaacctcgcaagagcagttttccaggcaaaaaagagggttcttgaacctctgggcctggttgaggaacctgttaagacggctccgggaaaaaagaggccggtagagcactctcctgcggagccagattcctcctccggaactggaaagtcgggcaaccagcctgcaagaaagagattgaattttggtcagactggagacgcagactccgtacctgacccccagcctctcggacagccaccagcagccccctctggtttgggatctactacaatggctacaggcagtggcgcaccagtggcagacaataacgagggtgccgatggagtgggtaattcctcgggaaattggcattgcgattcccaatggctgggcgacagagtcatcaccaccagcacccgaacctgggccctgcccacctacaacaaccacctctacaagcaaatctccagccaatcaggagcctcgaacgacaaccactactttggctacagcaccccttgggggtattttgacttcaacagattccactgccacttctcgccacgcgattggcaaagactcatcaacaacaactggggattccggcccaagagactcaacttcaagctctttaacattcaagtcaaagaggtcacgcagaatgacggtacgacgacgattgccaataaccttaccagcacggttcaggtgtttactgactcggagtaccagctcccgtacgtcctcggctcggcgcatcaaggatgcctcccgccgttcccagcagacgtcttcatggtcccacagtatggatacctcaccctgaacaacgggagtcaggcggtaggacgctcttccttttactgcctggagtactttccttctcagatgctacgtaccggaaacaatttcaccttcagctacacttttgaagacgttcctttccacagcagctacgctcacagccagagtctggatcggctgatgaatcctctcatcgaccagtacctgtattatctgaacaagacacaaacaaatagtggaactcttcagcagtctcggctactgtttagtcaagctggacccaccagcatgtctcttcaagctaaaaactggctgcctggaccttgctacagacagcagcgtctgtcaaagcaggcaaacgacaacaacaacagcaattttccctggactgcggctacaaagtatcatctaaatggccgggactctctggtgaatccaggaccagctatggccagtcacaaggatgacgaagaaaagtttttccccatgcatggaacattgatatttggtaaacaaggaacaaatgccaacgacgcggatttggaaaatgttatgattacagatgaagaagaaatcaggaccaccaatcccgtggctacggagcagtacggatatgtgtcaaataatttgcaaaactcaaacactggtccaactactggaactgtcaatcaccaaggagcgttacctggtatggtgtggcaggatagagacgtatacctacagggtcccatttgggccaagattcctcacaccgatggacactttcatccttctccgctgatgggaggttttggactcaaacacccgcctcctcagatcatgatcaaaaacactcccgttccagccaatcctcccacgaacttcagttctgccaagtttgcttctttcatcacacagtattccacggggcaggtcagcgtggagatcgagtgggagctgcagaaggagaacagcaaacgctggaatcccgagatccagtacacttccaactacaacaagtctgttaatgtggactttactgtggacactaatggcgtgtattcagagcctcgccccattggcaccagatacctgactcgtaatctgtaattgcttgttaatcaataaaccgtttaattcgtttcagttgaactttggtctctgcgtacttcttttcttatctagtttccatggctacgtagataagtagcatggagggttaatcattaactacaaggaacccctagtgatggagttggccactccctctctgcgcgctcgctcgctcactgaggccgggcgaccaaaggtcgcccgacgcccgggctttgcccgggcggcctcagtgagcgagcgagcgcgcagagagggagtggccaa

SEQ ID NO: 99 - DNA, 4682 bp, adeno-associated virus 2
ttggccactccctctctgcgcgctcgctcgctcactgaggccgggcgaccaaaggtcgcccgacgcccgggctttgcccgggcggcctcagtgagcgagcgagcgcgcagagagggagtggccaactccatcactaggggttcctggaggggtggagtcgtgacgtgaagtacgtcatagggttagggaggtcctgtattagaggtcacgtgagtgttttacgacattttgcgacaccatgtggtcacgctgggtatttacgcccgagtgagcacgcagggtctccattttgaagcgggaggtttgaacgcgcagccgccatgccgggattttacgagattgtgattaaggtccccagcgaccttgacgagcatttgcccggcatttctgacagctttgtgaactgggtggccgagaaggaatgggagttgccgccagattctgacatggatctgaatctgattgagcaggcacccctgaccgtggccgaaaagctgcagcgcgactttctgacggagtggcgccgtgtgagtaaggccccggaggcccttttctttgtgcaatttgagaagggagagagctacttccacatgcacgtgcttgtggaaaccaccggggtgaaatccatggttttgggacgtttcctgagtcagattcgcgaaaaactgattcagagaatttaccgcgggatcgagccgactttgccaaactggtttgcggtcacaaagacccgaaatggcgccggaggcgggaacaaggtggtggatgagtgctacatccccaattacctgctccccaaaacccagcctgagctccagtgggcgtggactaatatggaacagtatttaagcgcctgtttgaatctcgcggagcgtaaacggttggtggcgcagcatctgacgcacgtgtcgcagacgcaggagcagaacaaagagaatcagaatcccaattctgacgcgccggtgatcagatcaaaaacctcagccaggtacatggagctggtcgggtggctcgtggataaggggattacctcggagaagcagtggatccaggaggaccaggcttcatacatctccttcaatgcggcctccaactcgcggtcccaaattaaggctgctctggacaatgcgggaaagatcatgagcctgactaaaaccgcccccgactacctggtgggccagcagcccgtggaggacatttccagcaatcggatttataaaatcttggaactgaacgggtacgatccccaatacgcggcttccgtctttctgggatgggccacgaaaaagttcggcaagagaaacaccatctggctgtttggacctgcgaccacggggaagaccaacatcgcggaggccatagcccacactgtgcccttctacgggtgcgtaaactggaccaatgagaactttcctttcaatgattgcgtcgacaagatggtgatctggtgggaggagggaaagatgaccgccaaggtcgtggagtcggccaaagccattctcggaggaagcaaggtgcgcgtggaccagaaatgcaagtcctcggcccagatagacccgactcccgtgatcgtcacctccaacaccaacatgtgcgccgtgatygacgggaactcaacgaccttcgaacaccagcagccgttgcaagaccggatgttcaaatttgaactcacccgccgtctggatcatgactttgggaaggtcacaaagcaggaagtcaaagactttttccggtgggcaaaggatcacgtggttgaggtggagcatgaattctacgtcaaaaagggtggagccaagaaaagacccgcccctagtgacgcagatataagtgagcccaaacgggcgcgcgagtcagttgcgcagccatcgacgtcagacgcagaagcttcgatcaactacgcggacaggtaccaaaacaaatgttctcgtcacgtgggcatgaatctgatgctgtttccctgcagacaatgcgagagaatgaatcagaattcaaatatctgcttcactcacggacagaaagactgtttagagtgctttcccgtgtcagaatctcaacccgtttctgtcgtcaaaaaggcgtatcagaaactgtgctacattcatcatatcatgggaaaggtgccagacgcttgcactgcctgcgatctggtcaatgtggatttggatgactgcatctctgaacaataaatgatttaaatcaggtatggctgccgatggttatcttccagattggctccaagaaaacctatttttcgatatacgacagtggtggaagctcaaacctggcccaccaccaccaaagcccgcagagcggcatcaggacaacagcaggggtcttgtgcttcctgggtacaagtacctcggacccttcaacggactcgacaagggagagccggtcaacgaggcagacgccgcggccctcgagcacgacaaggcctacgaccggcagctcgacagcggagacaacccgtacctcaagtacaaccacgccgacgcggagtttcaggagcgtcttaaagaagatacgtcttttgggggcaacctcggacgagcagtcttccaggcgaaaaagagggttcttgaacctctgggcctggttgaggagcctgttaaaacggctccgggaaaaaagaggccggtagagcactctcctgcggagccagactcctcctcgggaaccggaaaagcgggcaascagcctgcgrgaaaaagattgaattttggtcagactggagwcgcagactccgtacctgacccccagcctctcggacagccaccagcagccccctctggtctgggaactaatacgatggctacaggcagtggcgcaccagtggcagacaataacgagggtgccgatggagtgggtaattcctcaggaaattggcattgcgattcccaatggctgggcgacagagtcatcaccaccagcacccgaacctgggccctgcccacctacaacaaccacctctacaagcaaatctccagccaatcaggagcctcaaacgacaaccactactttggctacagcaccccctgggggtattttgacttcaacagattccactgccacttttcaccacgtgactggcaaagactcatcaacaacaactggggattccgacccaagagactcaacttcaagctctttaacattcaagtcaaagaggtcacgcagaatgacggtacgacgacgattgccaataaccttaccagcacggttcaggtgtttactgactcggagtaccagctcccgtacgtcctcggctcggcgcatcaaggatgcctcccgccgttcccagcggacgtcttcatggtgccacagtatggatacctcaccctgaacaacgggagtcaggcggtaggacgctcttcattttactgcctggagtactttccttctcagatgcttcgtactggaaacaactttcagttcagctacacctttgaagacgttcctttccacagcagctacgctcacagccagagtctggataggctgatgaatcctctgattgaccagtacctgtattatctgaacaaaacacaatcaaatagtggaactcttcagcagtctcggctactgtttagtcaagctggacccaccagcatgtctcttcaagctaaaaactggctgcctggaccttgctacagacagcagcgtctgtcaaagcaggcaaacgacaacaacaaagcaggcaaacgacaacaacaacagcaactttccctggactgcggctacaaagtatcaactaaatggccgggaccagctatggccagccacaaagacgatgaagaaaagtttttccccatgcatggaaccctgatatttggtaaacaaggaacaaatgctaacgacgcggatttggacaatgtcatgattacagatgaagaagaaatccgcaccaccaatcccgtggctacggagcagtacggatatgtgtcaaataatttgcaaaactcaaatactggtccaactactggaactgtcaatcaccaaggagcgttacctggtatggtgtggcaggatcgagacgtgtacctgcagggacccatttgggccaagattcctcacaccgatggacactttcatccttctccactgatgggaggttttgggctcaaacacccgcctcctcagatcatgatcaaaaacactcccgttccagccaatcctcccacaaacttcagttctgccaagtttgcttctttcatcacacagtattccacggggcaggtcagcgtggagatcgagtgggagctgcagaaggagaacagcaaacgctggaatcccgagatccagtacacttccaactacaacaagtctgttaatgtggactttactgtggacactaatggtgtgtattcagagcctcgccccattggcaccagatacctgactcgtaatctgtaattgcttgttaatcaataaaccgtttaattcgtttcagttgaactttggtctctgtgtacttctttcttatctagtttccatggctacgtagataagtagcatggcgggttaatcattaactacaaggaacccctagtgatggagttggccactccctctctgcgcgctcgctcgctcactgaggccgggcgaccaaaggtcgcccgacgcccgggctttgcccgggcggcctcagtgagcgagcgagcgcgcagagagggagtggccaa

SEQ ID NO: 100 - DNA, 4679 bp, adeno-associated virus 2
ttggccactccctctctgcgcgctcgctcgctcactgaggccgggcgaccaaaggtcgcccgacgcccgggctttgcccgggcggcctcagtgagcgagcgagcgcgcagagagggagtggccaactccatcactaggggttcctggaggggtggagtcgtgacgtgaagtacgtcatagggttagggaggtcctgtattagaggtcacgtgagtgttttgcgacattttgcgacaccatgtggttacgctgggtatttaagcccgagtgagcacgcagggtctccattttgaagcgggaggtttgaacgcgcagccgccatgccgggtttttacgagattgtgattaaggtccccagcgaccttgacgagcatttgcccggcatttctgacagctttgtgaactgggtggccgagaaggaatgggagttgccgccagattctgacatggatctgaatctgattgagcaggcacccctgaccgtggccgagaagctgcagcgcgactttctgacggagtggcgccgcgtgagtaaggctccggaagcccttttttttgtgcaatttgagaagggagagagctacttccacatgcacgtgctggtggagaccaccggggtgaaatccatggtcttaggacgtttcctgagtcagattcgcgaaaaactgattcagagaatttaccgcgggatcgagccgactttgccaaattggttcgcggttacaaagacccgaaatggcgccggaggcgggaacaaggtggtggatgagtgctatatccccaattacctgctccccaaaacccagcctgagctccagtgggcgtggactaatatggaacagtatttaagcgcctgtttgaatctcgcggagcgtaaacggttggtggcgcagcatctgacgcacgtgtcgcagacgcaggagcagaacaaagaaaatcagaatcccaattctgacgcgccggtgattagatcaaaaacctcagccaggtacatggagctggtcgggtggctcgtggataaggggattacctcggagaagcagtggatccaggaggaccaggcttcatacatctcctttaatgcggcctccaactcgcggtcccaaatcaaggctgctctggacaatgcggggaagatcatgagcctgactaaaaccgcccccgactacctggtgggccagcagcccgtggaggacatttccagcaatcggatttataaaatcttggaactgaacgggtacgatccccaatatgcggcttccgtctttctgggatgggccacgaaaaagttcggcaagaggaacaccatctggctgtttgggcctgcaactaccgggaagaccaacatcgcggaggccatagcccacactgtgcctttttacgggtgcgtaaactggaccaatgagaactttccattcaacgactgtgttgacaagatggtgatctggtgggaggagggaaagatgaccgccaaggtcgtggagtcggccaaagccattctcggaggaagcaaggtgcgcgtggaccagaaatgcaagtcctcggcccagatagacccgactcccgtgatcgtcacctccaacaccaacatgtgcgccgtgattgacgggaactcaacgaccttcgaacaccagcagccgttgcaggaccggatgttcaaatttgaactcacccgccgtctggatcatgactttgggaaggtcaccaagcaggaagtcaaagactttttccggtgggcaaaggatcacgtggttgaggtggagcatgaattctacgtcaaaaagggtggagccaagaaaagacccgcccccagtgacgcagatataagtgagcccaaacgggcgcgcgagtcagttgcgcagccatcgacgtcagacgcggaagcttcgatcaactacgcggacaggtaccaaaacaaatgttctcgtcacgtgggcatgaatctgatgctgtttccctgcagacaatgcgagagaatgaatcagaattcaaatatctgcttcactcacggacagaaagactgtttagagtgctttcccgtgtcagaatctcaacccgtttctgtcgtcaaaaaggcgtatcagaaactttgctacattcatcatatcatgggaaaggtgccagacgcttgcactgcctgcgacctggtcaatgtggatttggatgactgcatctctgaacaataaatgatttaaatcaggtatggctgccgatggttatcttccagattggctcgaggacactctctctgaaggaataagacagtggtggaagctcaaacctggcccaccaccaccaaagcccgcagagcggcataaggacgacagcaggggtcttgtgcttcctgggtacaagtacctcggacccttcaacggactcgacaagggagagccggtcaacgaggcagacgccgcggccctcgagcacgacaaggcctacgaccggcagctcgacagcggagacaacccgtacctcaagtacaaccacgccgacgcggagtttcaggagcgtcttaaagaagatacgtcttttgggggcaacctcggacgagcagtcttccaggcgaaaaagagggttcttgaacctctgggcctggttgaggaacctgttaaaacggctccgggaaaaaagaggccggtagagcactctcctgtggagccagactcctcctcgggaaccggaaaagcgggccagcagcctgcaagaaaaagactgaatttcggtcagactggagacgcagactccgtacctgacccccagcctctcggacagccaccagcagccccctctggtctgggatctactacaatggctacaggcagtggcgcaccaatggcagacaataacgagggtgccgatggagtgggtaattcctcaggaaattggcattgcgattcccaatggctgggcgacagagtcatcaccaccagcacccgaacctgggccctgcccacctacaacaaccacctctacaagcaaatctccagccaatcaggagcctcaaacgacaaccactactttggctacagcaccccctgggggtattttgacttcaacagattccactgccacttttcaccacgtgactggcaaagactcatcaacaacaactggggattccgacccaagagactcaacttcaagctctttaacattcaagtcaaggaggtcacgcagaatgacggtacgacgacgattgccaataaccttaccagcacggttcaggtgtttactgactcggagtaccagctcccgtacgtcctcggctcggcgcatcaaggatgcctcccgccgttcccagcagacgtcttcatggtcccacagtatggatacctcaccctgaacaacgggagtcaggcggtaggacgctcttccttttactgcctggagtactttccttctcagatgctgcgtactggaaacaactttcagttcagctacacctttgaagacgttcctttccacagcagctacgctcacagccagagtctggatcggctgatgaatcctctgatcgaccagtacctgtattatctgaacaagacacagtcaaatagtggaactcttcagcagtctcggctactgtttagtcaagctggacccaccagcatgtctcttcaagctaaaaactggctgcctggaccttgctacagacagcagcgtctgtcaaaacaggcaaacgacaacaacaacagcaactttccctggactgcggctacaaagtatcatctaaatggccgggactcgttggttaatccagggccagctatggccagccacaaagacgatgaagaaaagtttttccccatgcatggaaccctgatatttggtaaacaaggaacaaatgctaacgacgcggatttggacaatgtcatgattacagatgaagaagaaatccgcaccaccaatcccgtggctacggagcagtacggatatgtgtcaaataatttgcagagcggcaacacacaagcagctactggaactgtcaatcaccaaggagcgttacctggtatggtgtggcaggatcgagacgtgtacctgcagggacccatttgggccaagattcctcacaccgatggacactttcatccttctccactgatgggaggttttgggctcaaacacccgcctcctcagatcatgatcaaaaacactcccgttccagccaatcctcccacaaacttcagttctgccaagtttgcttctttcatcacacagtattccacggggcaggtcagcgtggagatcgagtgggagctgcagaaggagaacagcaaacgctggaatcccgaaattcagtacacttccaactacaacaagtctgttaatgtggactttactgtggacactaatggcgtgtattcagagcctcgccccattggcaccagatacctgactcgtaatctgtaattgcttgttaatcaataaaccgtttaattcgtttcagttgaactttggtctctgtgtacttctttcttatctagtttccatggctacgtagataagtagcatggcgggttaatcattaactacaaggaacccctagtgatggagttggccactccctctctgcgcgctcgctcgctcactgaggccgggcgaccaaaggtcgcccgacgcccgggctttgcccgggcggcctcagtgagcgagcgagcgcgcagagagggagtggccaa

SEQ ID NO: 101 - DNA, 4679 bp, adeno-associated virus 2
ttggccactccctctctgcgcgctcgctcgctcactgaggccgggcgaccaaaggtcgcccgactcccgtgatcgcccgggcggcctcagtgagcgagcgagcgcgcagagagggagtggccaactccatcactaggggttcctggaggggtggagtcgtgacgtgaagtacgtcatagggttagggaggtcctgtattagaggtcacgtgagtgttttgcgacattttgcgacaccatgtggtcacgctgggtatttaagcccgagtgagcacgcagggtctccattttgaagcgggaggtttgaacacgcagccgccatgccggggttttacgagattgtgattaaggtccccagcgaccttgacgagcatttgcccggcatttctgacagctttgtgaactgggtggccgagaaggaatgggagttgccgccagattctgacatggatctgaatctgattgagcaggcacccctgaccgtggccgagaagctgcagcgcgactttctgacggagtggcgccgtgtgagtaaggccccggaggcccttttctttgtgcaatttgagaagggagagagctacttccacatgcacgttctggtggagactaccggggtaaaatccatggttttgggacgtttcctgagtcagattcgcgaaaaactgattcagagaatttaccgcgggatcgagccgactttgccaaactggttcgcggttacaaagacccgaaatggcgccggaggcgggaacaaggtggtggatgagtgctacatccccaattacctgctccccaaaacccagcctgagctccagtgggcgtggactaatatggaacagtatttaagcgcctgtttgaatctcgcggagcgtaaacggttggtggcgcagcatctgacgcacgtgtcgcagacgcaggagcagaacaaagagaatcaaaatcccaattctgacgcgccggtgattagatcaaaaacctcagccaggtacatggagctggtcgggtggctcgtggataaggggattacgtcggagaagcagtggattcaggaggaccaggcctcatacatctccttcaatgcggcctccaactcgcggtcccaaatcaaggctgctctggacaatgcaggaaagatcatgagcctgactaaaaccgcccccgactacctggtgggccagcagcccgtagaggacatttccagcaatcggatttataaaatcttggaactgaacgggtacgatccccaatatgcggcttccgtctttctgggatgggccacgaaaaagttcggcaagaggaacaccatctggctgtttgggcctgcaactaccgggaagaccaacatcgcggaggccatagcccacactgtgcccttctacgggtgcgtaaactggaccaatgagaactttcctttcaacgactgtgtcgacaagatggtgatctggtgggaggagggaaagatgaccgccaaggtcgtggagtcggccaaagccattctcggaggaagcaaggtgcgcgtggaccagaaatgcaagtcctcggcccagatagacccgactcccgtgatcgtcacctccaacaccaacatgtgcgccgtgattgacggaaactcaacgaccttcgaacaccagcagccgttgcaagaccggatgttcaaatttgaactcacccgccgtctggatcatgactttgggaaggtcaccaagcaggaagtcaaagactttttccggtgggcaaaggatcacgtggttgaggtggagcatgaattctacgtcaaaaagggtggagccaagaaaagacccgcccccagtgacgcagatataagtgagcccaaacgggcgcgcgagtcagttgcgcagccatcgacgtcagacgcggaagcttcgatcaactacgcggacaggtaccaaaacaaatgttctcgtcacgtgggcaagaatctgatgctgtttccctgcagacaatgcgagagaatgaatcaaaattcaaatatctgcttcactcacggacagaaagactgtttagagtgctttcccgtgtcagaatctcaacccgtttctgtcgtcaaaaaggcgtatcagaaactttgctacattcatcacataatgggaaaggtgccagacgcttgcactgcctgcaatctggtcaatgtggatttggatgactgcatctctgaacaataaatgatttaaatcaggtatggctgccgatggttatcttccagattggctcgaggacactctctctgaaggaataagacagtggtggaagctcaaacctggcccaccgccaccaaagcccgcagagcggcataaggacgacaacaggggtcttgtgcttcctgggtacaagtacctcggacccttcaacggactcgacaagggagagccggtcaacgaggcagacgccgcggccctcgagcacgacaaggcctacgaccggcagctcgacagcggagacaacccgtacctcaagtacaaccacgccgacgcggagtttcaggagcgccttaaagaagatacgtcttttgggggcaacctcggacgagcagtcttccaggcgaaaaagagggttcttgaacctctgggcctggttgaggaacctgttaagacggctccgggaaaaaagaggccggtagagcactctcctgtggagccagactcctcctcgggaaccggaaaagcgggccagcagcctgcaagaaaaagattgaatttcggtcagactggagacgcagactccgtacctgacccccagcctctcggacagccaccagcagccccctctggtctgggatctactacaatggctacaggcagtggcgcaccaatggcagacaataacgagggtgccgatggagtgggtaattcctcaggaaattggcattgcgattcccaatggctgggcgacagagtcatcaccaccagcacccgaacctgggccctgcccacctacaacaaccacctctacaagcaaatctccagccaatcaggagcctcaaacgacaaccactactttggctacagcaccccctgggggtattttgacttcaacagattccactgccacttttcaccacgtgactggcaaagactcatcaacaacaactggggattccgacccaagagactcaacttcaagctctttaacattcaagtcaaagaggtcacgcagaatgacggtacgacgacgattgccaataaccttaccagcacggttcaggtgtttactgactcggagtaccagctcccgtacgtcctcggctcggcgcaccaaggatgcctcccgccgttcccagcggacgtcttcatggtcccacagtatggatacctcaccctgaacaacgggagtcaggcggtaggacgctcttccttttactgcctggagtactttccttctcagatgctgcgtactggaaacaactttcagttcagctacacctttgaagacgttcctttccacagcagctacgctcacagccagagtctggatcggctgatgaatcctctgatcgaccagtacctgtattatctgaacaagacacaatcaaatagtggaactcttcagcagtctcggctactgtttagtcaagctggacccaccagcatgtctcttcaagctaaaaactggctgcctggaccttgctacagacagcagcgtctgtcaaagcaggcaaacgacaacaacaacagcaactttccctggactgcggctacaaagtatcatctaaatggccgggactcgttggttaatccgggcccggctatggccagccacaaagacgatgaagaaaagtttttccccatgcatggaaccctgatatttggtaaacaaggaacaaatgctaacgacgcggatttggacaatgtcatgattacagatgaagaagaaatccgcaccaccaatcccgtggctacggagcagtacggatatgtgtcaaataatttgcaaaactcaaatactggtccaactactggaactgtcaatcaccaaggagcgttacctggtatggtgtggcaggatcgagacgtgtacctgcagggacccatttgggccaagattcctcacaccgatggacactttcatccttctccactgatgggaggttttgggctcaaacacccgcctcctcagatcatgatcaaaaacactcccgttccagccaatcctcccacaaacttcagttctgccaagtttgcttctttcatcacacagtattccacggggcaggtcagcgtggagatcgagtgggagctgcagaaagagaacagcaaacgctggaaccccgagatccagtacacttccaactataacaagtctgttaatgtggactttactgtggacactaatggtgtgtattcagagcctcgccccattggcaccagatacctgactcgtaatctgtaattgcttgttaatcaataaaccgtttaattcgtttcagttgaactttggtctctgtgtacttcttttcttatctagtttccatggctacgtagataagtagcatggcgggttaatcattaactctaaggaacccctagtgatggagttggccactccctctctgcgcgctcgctcgctcactgaggccgggcgaccaaaggtcgcccgacgcccgggctttgcccgggcggcctcagtgagcgagcgagcgcgcagagagggagtggccaa

SEQ ID NO: 102 - DNA, 4680 bp, adeno-associated virus 2
ttggccactccctctctgcgcgctcgctcgctcactgaggccgggcgaccaaaggtcgcccgacgcccgggctttgcccgggcggcctcagtgagcgagcgagcgcgcagagagggagtggccaactccatcactaggggttcctggaggggtggagtcgtgacgtgaagtacgtcatagggttagggaggtcctgtattagaggtcacgtgagtgttttgcgacattttgcgacaccatgtggtcacgctgggtatttaagcccgagtgagcacgcagggtctccattttgaagcgggaggtttgaacgcgcagccgccatgccggggttttacgagattgtgattaaggtccccagcgaccttgacgagcatttgcccggcatttctgacagctttgtgaactgggtggccgagaaggaatgggagttgccgccagattctgacatggatctgaatctgattgagcaggcacccctgaccgtggccgagaagctgcagcgcgactttctgacggagtggcgccgcgtgagtaaggccccggaggccctcttctttgtgcaatttgagaagggagagagctacttccacatgcatgtgctggtggagaccaccggggtgaaatccatggttttgggacgtttcctgagtcagattcgcgaaaaactgattcagagaatttaccgcgggatcgagccgactttgccaaactggttcgcggtcacaaagacccgaaatggcgccggaggcgggaacaaggtggtggatgagtgctacatccccaattacctgctccccaaaacccagcctgagctccagtgggcgtggactaatatggaacagtatttaagcgcctgtttgaatctcgcggagcgtaaacggttggtggcgcagcatctgacgcacgtgtcgcagacacaggagcagaacaaagagaatcagaatcccaattctgacgcgccggtgattagatcaaaaacctcagccaggtacatggagctggtcgggtggctcgtggataaggggattacctcggagaagcagtggatccaggaggaccaggcttcatacatctccttcaatgcggcctccaactcgcggtcccaaatcaaggctgctctggacaatgcgggaaagattatgagcctgactaaaaccgcccccgactacctggtgggccagcagcccgtggaggacatttccaacaatcgaatttataaaatcttggaactgaacgggtacgatccccaatacgctgcttccgtctttctgggatgggccacgaagaagttcggcaagaggaacaccatctggctgtttgggcctgcaactaccggaaagaccaacatcgcggaggccatagcccacactgtgcccttctacgggtgcgtaaactggaccaatgagaactttcccttcaacgactgtgtcgacaagatggtgatctggtgggaggagggaaagatgaccgccaaggtcgtggagtcggccaaagccattctcggaggaagcaaggtgcgcgtggaccagaaatgcaagtcctcggcccagatagacccgactcccgtgatcgtcacctccaacaccaacatgtgcgccgtgattgacgggaactcaacgaccttcgaacaccagcagccgttgcaagaccggatgttcaaatttgaactcacccgccgtctggatcatgactttgggaaggtcaccaagcaggaagtcaaagactttttccggtgggcaaaggatcacgtggttgaggtggagcatgaattctacgtcaaaaagggtggagccaagaaaagacccgcccccagtgacgcagatataagtgagcccaaacgggcgcgcgagtcagttgcgcagccatcgacgtcagacgcggaagcttcgatcaactacgcggacaggtaccaaaacaaatgttctcgtcacgtgggcatgaatctgatgctgtttccctgcagacaatgcgagagaatgaatcaaaattcaaatatctgcttcactcacggacagaaagactgtttagagtgctttcccgtgtcagaatctcaacccgtttctgtcgtcaaaaaggcgtatcagaaactgtgctacattcatcatatcatgggaaaggtgccagacgcttgcactgcctgcgatctggtcaatgtggatttggatgactgcatctctgaacaataaatgatttaaatcaggtatggctgccgatggttatcttccagattggctcgaggacactctctctgaaggaataagacagtggtggaagctcaaacctggcccaccaccaccaaagcccgcagagcggcataaggacgacagcaggggtcttgtgcttcctgggtacaagtacctcggacccttcaacggactcgacaagggagagccggtcaacgaggcagacgccgcggccctcgagcacgacaaggcctacgaccggcagctcgacagcggagacaacccgtacctcaagtacaaccacgccgacgcggagtttcaggagcgccttaaagaagatacgtcttttgggggcaacctcggacgagcagtcttccaggcgaaaaagagggttcttgaacctctgggcctggttgaggaacctgttaagacggctccgggaaaaaagaggccggtagagcactctcctgtggagccagactcctcctcgggaaccggaaaagcgggccagcagcctgcaagaaaaagattgaattttggtcagactggagacgcagactccgtacctgacccccagcctctcggacagccaccagcagccccctctggtttgggatctactacaatggctacaggcagtggcgcaccagtggcagacaataacgagggtgccgatggagtgggtaattcctcaggaaattggcattgcgattcccaatggctgggcgacagagtcatcaccaccagcacccgaacctgggccctgcccacctacaacaaccacctctacaagcaaatctccagccaatcaggagcctcaaacgacaaccactactttggctacagcaccccctgggggtattttgacttcaacagattccactgccacttttcaccacgtgattggcaaagactcatcaacaacaactggggattccgacccaagagactcaacttcaagctctttaacattcaagtcaaagaggtcacgcagaatgacggtacgacgacgattgccaataaccttaccagcacggttcaggtgtttactgactcggagtaccagctcccgtacgtcctcggctcggcgcaccaaggatgcctcccgccgttcccagcggacgtcttcatggtcccacagtatggatacctcaccctgaacaacgggagtcaggcggtaggacgctcttccttttactgcctggagtactttccttctcagatgctgcgtactggaaacaactttcagttcagctacacctttgaagacgttcctttccacagcagctacgctcacagccagagtctggatcggctgatgaatcctctgatcgaccagtacctgtattatctgaacaaaacacaatcaaatagtggaactcttcagcagtctcggctactgtttagtcaagctggacccaccagcatgtctcttcaagctaaaaactggctgcctggaccttgctacagacagcagcgtctgtcaaagcaggcaaacgacaacaacaacagcaactttccctggactgcggctacaaagtatcatctaaatggccgggactcgttggttaatccaggaccagctatggccagccacaaagacgatgaagaaaagtttttccccatgcatggaaccctgatatttggtaaacaaggaacaaatgctaacgacgcagatttggacaatgtcatgattacagatgaagaagaaatccgcaccaccaatcccgtggctacggagcagtacggatatgtgtcaaataatttgcaaaactcaaatactggtccaactactggaactgtcaatcaccaaggagcgttacctggtatggtgtggcaggatcgagacgtgtacctgcagggacccatttgggccaagattcctcacaccgatggacactttcatccttctccactgatgggaggttttgggctcaaacacccgcctcctcagatcatgatcaaaaacactcccgttccagccaatcctcctacaaacttcagttctgccaagtttgcttctttcatcacacagtactccacggggcaggtcagcgtggagatcgagtgggagctgcagaaggagaacagcaaacgctggaatcccgagattcagtacacttcaaactacaacaagtctgttaatgtggactttactgtggacactaatggcgtgtattcagagcctcgccccattggcaccagatacctgactcgtaatctgtaattgcttgttaatcaataaaccgtttaattcgtttcagttgaactttggtctccgcgtacttcttttcttatctagtttccatggctacgtagataagtagcatggcgggttaatcattaactacaaggaacccctagtgatggagttggccactccctctctgcgcgctcgctcgctcactgaggccgggcgaccaaagctcgcccgacgcccgggctttgcccgggcggcctcagtgagcgagcgagcgcgcagagagggagtggccaa

SEQ ID NO: 103 - DNA, 4680 bp, adeno-associated virus 2
ttggccactccctctctgcgcgctcgctcgctcactgaggccgggcgaccaaaggtcgcccgacgcccgggctttgcccgggcggcctcagtgagcgagcgagcgcgcagagagggagtggccaactccatcactaggggttcctggaggggtggagtcgtgacgtaaattacgtcatagggttagggaggtcctgtattagaggtcacgtgagtgttttgcgacattttgcgacaccatgtggtcacgctgggtatttaagcccgagtgagcacgcagggtctccattttgaagcgggagttttgaacgcgcagccgccatgccggggttttacgagattgtgattaaggtccccagcgaccttgacgagcatctgccgggcatttctgacagctttgtgaactgggtggccgagaaggaatgggagttgccgccagattctgacatggatttgaatctgattgagcaggcacccctgaccgtggccgagaagctgcagcgcgactttctgacggagtggcgccgtgtgagtaaggccccggaggccctcttctttgtacaatttgagaagggagagagctatttccacatgcacgtgctcgtggaaaccaccggggtgaaatccatggttttgggacgtttcctgagtcagattcgtgaaaaactgattcagagaatttaccgcgggatcgagccgactttgccaaactggttcgcggtcacaaagaccagaaatggcgccggaggcgggaacaaggtggtggatgagtgctacatccccaattacctgctccccaaaacccagcctgagctccagtgggcgtggactaatatggaacagtatttaagcgcctgtttaaatctctcggagcgtaaacggttggtggcgcagcatctgacgcacgtgtcgcagacgcaggagcagaacaaagagaatcagaatcccaattctgacgcgccggtgatcagatcaaaaacctcagccaggtacatggagctggtcgggtggctcgtggacaaggggattacctcggagaagcagtggatccaggaggaccaggcctcatacatctccttcaatgcggcctccaactcgcggtcccaaatcaaggctgctctggacaatgcgggaaagatcatgagcctcactaaaactgcccccgactacctggtgggccagcagcccgtggaggacatttccagcaatcggatttataaaatcttggaactgaacgggtacgatccccaatacgcggcttccgtctttctgggatgggccacgaaaaagttcggcaagaggaacaccatctggctgtttgggcctgcaactaccgggaagaccaacatcgcggaggccatagcccacactgtgcccttctacgggtgcgtaaactggaccaatgagaactttcccttcaacgactgtgtcgacaagatggtgatctggtgggaggaaggaaagatgactgccaaggtcgtggagtcggccaaagccattcttggcggaagcaaggtgcgcgtggaccagaaatgcaagtcctcggcccagatagacccgactcccgtgatcgtcacctccaacaccaacatgtgcgccgtgattgacgggaactcaacgaccttcgagcaccagcagccgttgcaagatcggatgttcaaatttgaactcacccgccgtctggatcatgactttgggaaggtcaccaagcaggaagtcaaagactttttccggtgggcaaaggatcacgtggttgaggtggagcatgaattctacgtcaaaaagggtggagccaaaaaaagacccgcccccagtgacgcagatataagtgagcccaaacgggcgcgcgagtcagttgcgcagccatcgacgtcagacgcggaagcttcgatcaactacgcggacaggtaccaaaacaaatgttctcgtcacgtgggcatgaatctgatgctgtttccctgcagacaatgcgagagaatgaatcagaattcaaatatttgcttcactcacggacagaaagactgtttagagtgctttcccgtgtcagaatctcaacccgtttctgtcgtcaaaaaggcgtatcagaaactgtgctacattcatcatatcatgggaaaggtaccagacgcttgcactgcctgcgatctggtcaatgtggatttggatgactgcatctctgaacaataaatgatttaaatcaggtatggctgccgatggttatcttccagattggctcgaggacactctctctgaaggaataagacagtggtggaagctcaaacctggcccaccaccaccaaagcccgcagagcggcataaggacgacagcaggggtcttgtgcttcctgggtacaagtacctcggacccttcaacggactcgacaagggagagccggtcaacgaggcagacgccgcggccctcgagcacgacaaggcctacgaccggcagctcgacagcggagacaacccgtacctcaagtacaaccacgccgacgcggagtttcaggagcgtcttaaagaagatacgtcttttgggggcaacctcggacgagcagtcttccaggcgaaaaagagggttcttgaacctctgggcctggttgaggaacctgttaagacggctccgggaaaaaagaggccggtagagcactctcctgtggagccagactcctcctcgggaaccggaaaagcgggccagcagcctgcaagaaaaagattgaattttggtcagactggagacgcagactccgtacctgacccccagcctctcggacagccaccagcagccccctctggtctgggatctactacaatggctacaggcagtggcgcaccaatggcagacaataacgagggtgccgatggagtgggtaattcctcaggaaattggcattgcgattcccaatggctgggcgacagagtcatcaccaccagcacccgaacctgggccctgcccacctacaacaaccacctctacaagcaaatctccagccaatcaggagcctcaaacgacaaccactactttggctacagcaccccctgggggtattttgacttcaacagattccactgccacttttcaccacgtgattggcaaagactcatcaacaacaactggggattccgacccaagagactcaacttcaagctctttaacattcaagtcaaagaggtcacgcagaatgacggtacgacgacgattgccaataaccttaccagcacggttcaggtgtttactgactcggagtaccagctcccgtacgtcctcggctcggcgcaccaaggatgcctcccgccgttcccagcggacgtcttcatggtcccacagtatggatacctcaccctgaacaacgggagtcaggcggtaggacgctcttccttttactgcctggagtactttccttctcagatgcttcgtactggaaacaactttcagttcagctacacctttgaagacgttcctttccacagcagctacgctcacagccagagtctggatcggctgatgaatcctctgatcgaccagtacctgtattatctgaacaaaacacaatcaaatagtggaactcttcagcagtctcggctactgtttagtcaagctggacccaccagcatgtctcttcaagctaaaaactggctacctggaccttgctacagacagcagcgtctgtcaaagcaggcaaacgacaacaacaacagcaactttccctggactgcagctacaaagtatcatctaaatggccgggactcgttggttaatccaggaccagctatggccagtcacaaggatgacgaagaaaagtttttccccatgcatggaaccctgatatttggtaaacaaggaacaaatgccaacgacgcggatttggaaaatgtcatgattacagacgaagaagaaatcaggaccaccaatcccgtggctacggagcagtatgggactgtgtcaaataatttgcaaaactcaaacactggtccaactactggaactgtcaatcaccaaggagcgttacctggtatggtgtggcaggatcgagacgtgtacctgcagggacccatttgggccaagattcctcacaccgatggacactttcatccttctccactgatgggaggttttgggctcaaacacccgcctcctcagatcatgatcaaaaacactcccgttccagccaatcctcctacaaacttcagttctgccaagtttgcttctttcatcacacagtactccacggggcaggtcagcgtggagatcgagtgggagctgcagaaggagaacagcaaacgctggaatcccgagattcagtacacttccaactacaacaaatctgttaatgtggactttactgtggacactaatggtgtgtattcagagcctcgccccattggcaccagatacctgactcgtaatctgtaattgcttgttaatcaataaaccgtgtaattcgtttcagttgaactttggtctatgcgtacttcttttcttatctggtttccatggctacgtagataagtagcatggcgggctaatcattaactctaaggaacccctagtgatggagttggccactccctctctgcgcgctcgctcgctcactgaggccgggcgaccaaaggtcgcccgacgcccgggctttgcccgggcggcctcagtgagcgagcgagcgcgcagagagggagtggccaa

SEQ ID NO: 104 - DNA, 4679 bp, adeno-associated virus 2
ttggccactccctctctgcgcgctcgctcgctcactgaggccgggcgaccaaaggtcgcccgacgcccgggctttgcccgggcggcctcagtgagcgagcgagcgcgcagagagggagtggccaactccatcactaggggttcctggaggggtggagtcgtgacgtgaattacgtcatagggttagggaggtcctgtattagaggtcacgtgagtgttttgcgacattttgcgacaccatgtggttacgctgggtatttaagcccgagtgagcacgcagggtctccattttgaagcgggaggtttgaacgcgcagtcgccatgccggggttttacgagattgtgattaaggtccccagcgaccttgacgagcatctgcccggcatttctgacagctttgtgaactgggtggccgaaaaggaatgggagttgccgccagattctgacatggatctgaatctgattgagcaggcacccctgaccgtggccgagaagctgcagcgcgactttctgacggagtggcgccgcgtgagtaaggccccggaggccctcttctttgtgcaatttgagaagggagagagctatttccacatgcacgtgctggtggagaccaccggggtgaaatccatggttttgggacgtttcctgagtcagattcgcgaaaaactgattcagagaatttaccgcgggattgagccgactttgccaaactggttcgcggtcacaaagacccgaaatggcgccggaggcgggaacaaggtggtggatgagtgctacatccccaattacctgctccccaaaacccagcctgagctccagtgggcgtggactaatatggaacagtatttaagcgcctgtttgaatctcgcggagcgtaaacggttggtggcgcagcatctgacgcacgtgtcgcagacgcaggagcagaacaaagagaatcagaatcccaattctgacgcgccggtgattagatcaaaaacctcagccaggtacatggagctggtcgggtggctcgtggataaggggattacctcggagaagcagtggatccaggaggaccaggcctcatacatctcctttaatgcggcctccaactcgcggtcccagatcaaggctgctctggacaatgcgggaaagatcatgagcctcactaaaacggcccccgactacctggtgggccagcagcccgtggaggacatttccagcaataggatttataaaatcttggaactgaacgggtacgatccccaatacgcggcttccgtctttctgggatgggccacgaaaaagttcggcaagagaaacaccatctggctgtttgggcctgcaactaccgggaagaccaacatcgcggaagccatagcccacactgtgcccttctacgggtgcgtaaactggaccaatgagaactttcccttcaacgactgtgtcgacaagatggtgatctggtgggaggaggggaagatgaccgccaaggtcgtggagtcggccaaagccattctcggtggaagcaaggtgcgcgtggaccagaaatgcaagtcctcggcccagatagacccgactcccgtgatcgtcacctccaacaccaacatgtgcgccgtgattgacgggaactcaacgaccttcgaacaccagcagccgttgcaagaccggatgttcaaatttgaactcacccgccgtctagatcatgactttgggaaggttaccaagcaggaagtcaaagactttttccggtgggcaaaggatcacgtggttgaggtggagcatgaattctacgtcaaaaagggtggagccaagaaaagacccgcccccagtgacgcagatataagtgagcccaaacgagcgcgcgagtcagttgcgcagccatcgacgtcagacgcggaagcttcaatcaactacgcggacaggtaccaaaacaaatgttctcgtcacgtgggcatgaatctgatgctgtttccctgcagacaatgcgagagaatgaatcagaattcaaatatctgcttcactcatggacagaaagactgtttagagtgctttcccgtgtcagaatctcaacccgtttctgtcgtcaaaaaggcgtatcagaaactttgctacattcatcatatcatgggaaaggtgccagacgcttgcactgcctgcgatctggtcaatgtggatttggatgactgcatctctgaacaataaatgatttaaatcaggtatggctgccgatggttatcttccagattggctcgaggacactctctctgaaggaataagacagtggtggaagctcaaacctggcccaccaccaccaaagcccgcagagcggcataaggacgacagcaggggtcttgtgcttcctgggtacaagtacctcggacccttcaacggactcgacaagggagagccggtcaacgaggcagacgccgcggccctcgagcacgacaaggcctacgaccggcagctcgacagcggagacaacccgtacctcaagtacaaccacgccgacgcggagtttcaggagcgccttaaagaagatacgtcttttgggggcaacctcggacgagcagtcttccaggcgaaaaagagggttcttgaacctctgggcctggttgaggaacctgttaagacggctccgggaaaaaagaggccggtagagcactctcctgtggagccagactcctcctcgggaaccggaaaagcgggccagcagcctgcaagaaaaagactgaatttcggtcagactggagacgcagactccgtacctgacccccagcctctcggaaagccaccagcagccccctctggtctgggatctactacaatggctacaggcagtggcgcaccaatggcagacaataacgagggcgccgatggagtgggtaattcctcaggaaattggcattgcgattcccaatggctgggcgacagagtcatcaccaccagcacccgaacctgggccctgcccacctacaacaaccacctctacaagcaaatctccagccaatcaggagcctcaaacgacaaccactactttggctacagcaccccctgggggtattttgacttcaacagattccactgccacttttcaccacgtgactggcaaagactcatcaacaacaactggggattccgacccaagagactcaacttcaagctctttaacattcaagtcaaagaggtcacgcagaatgacggtacgacgacgattgccaataaccttaccagcacggttcaggtgtttactgactcggagtaccagctcccgtacgtcctcggctcggcgcatcaaggatgcctcccgccgtttccagcggacgtcttcatggtcccacagtatggatacctcaccctgaacaacgggagtcaggcggtaggacgctcttccttttactgcctggagtactttccttctcagatgctgcgtactggaaacaactttcagttcagctacacctttgaagacgttcctttccacagcagctacgctcacagccagagtctggatcggctgatgaatcctctgatcgaccagtacctgtattatctgaacaagacacaatcaaatagtggaactcttcagcagtctcggctactgtttagtcaagctggacccaccagcatgtctcttcaagctaaaaactggctgcctggaccttgctacagacagcagcgtctgtcaaagcaggcaaacgacaacaacaacagcaactttccctggactgcggctacaaagtatcatctaaatggccgggactcgttggttaatccaggaccagctatggccagccacaaagacgatgaagaaaagtttttccccatgcatggaaccctgatatttggtaaacaaggaacaaatgctaacgacgcggatttggacaatgtcatgattacagatgaagaagaaatccgcaccaccaatcccgtagctacggagcagtacggatatgtgtcaaataatttgcaaaactcaaatactggtccaactactggaactgtcaatcaccaaggagcgttacctggtatggtgtggcaggatcgagacgtgtacctgcagggacccatttgggccaagattcctcacaccgatggacactttcatccttctccactgatgggaggttttgggctcaaacacccgcctcctcagatcatgatcaaaaacactcccgttccagccaatcctcctacaaacttcagttcttccaagtttgcttctttcatcacacagtattccacggggcaggtcagcgtggagatcgagtgggagctgcagaaggagaacagcaaacgctggaatcccgaaattcagtatacttccaactacaacaaatctgttaatgtggactttactgtggacactaatggtgtgtattcagagcctcgccccattggcaccagatacctgactcgtaatctgtaattgcttgttaatcaataaaccgtgtaattcgtttcagttgaactttggtctttgcgtacttctttcttatctagtttccatggctacgtagataagtagcatggagggttaatcattaactacaaggaacccctagtgatggagttggccactccctctctgcgcgctcgctcgctcactgaggccgggcgaccaaaggtcgcccgacgcccgggctttgcccgggcggcctcagtgagcgagcgagcgcgcagagagggagtggccaa

SEQ ID NO: 105 - DNA, 4680 bp, adeno-associated virus 2
ttggccactccctctctgcgcgctcgctcgctcactgaggccgggcgaccaaaggtcgcccgacgcccgggctttgcccgggcggcctcagtgagcgagcgagcgcgcagagagggagtggccaactccatcactaggggttcctggaggggtggagtcgtgacgtgaattacgtcatagggttagggaggtcctgtattagaggtcacgtgagtgttttgcgacattttgcgacaccatgtggtcacgctgggtatttaagcccgagtgagcacgcagggtctccattttgaagcgggaggtttgaacgcgcagccgccatgccgggattttacgagattgtgattaaggtccccagcgaccttgacgagcatctgcccggcatttctgacagctttgtgaactgggtggccgagaaggaatgggagttgccgccagattctgacatggatctgaatctgattgagcaggcacccctgaccgtggccgaaaagctgcagcgtgactttctgacggagtggcgccgcgtgagtaaggccccggaggccctcttctttgtgcaatttgagaagggagagagttacttccacatgcacatgctggtggagaccaccggggtgaaatccatggttttgggacgtttcctgagtcagattcgcgaaaaactgattcagagaatttaccgcgggatcgagccgactttgccaaactggttcgcggtcacaaagacccgaaatggcgccggaggcgggaacaaggtggtggatgagtgctacatccccaattacctgctccccaaaacccagcctgagctccagtgggcgtggactaatatggaacagtatttaagcgcctgtttgaatctcgcggagcgtaaacggttggtggcgcagcatctgacgcacgtgtcgcagacgcaggagcagaacaaagagaatcagaatcccaattctgacgcgccggtgattagatcaaaaacatcagccaggtacatggagctggtcgggtggctcgtggataaggggattacctcggagaagcagtggatccaggaggaccaggcttcatacatctccttcaatgcggcctccaactcgcggtcccaaatcaaggctgctcttgacaatgcgggaaagatcatgagcctgactaaaaccgcccccgactacctggtgggccagcagcccgtggaggacatttccagcaatcggatttataaaatcttggaactgaacgggtacgatccccaatacgcggcttccgtctttctgggatgggccacgaaaaagttcggcaagaggaacaccatctggctgtttgggcctgcaaccaccgggaagaccaacatcgcggaggccatagcccacactgtgcccttctacgggtgcgtaaactggaccaatgagaactttcccttcaacgactgcgtcgacaagatggtgatctggtgggaggagggaaagatgactgccaaggtcgtggagtctgccaaagccattctcggaggaagcaaggtgcgcgtggaccagaaatgcaagtcctcggcccagatagacccgactcccgtgatcgtcacctccaacaccaacatgtgcgccgtgattgacgggaactcaacgaccttcgaacatcagcagccgttgcaagaccggatgttcaaatttgaactcacccgccgtctggatcatgactttgggaaggtcaccaagcaggaagtcaaagactttttccggtgggcaaaggatcacgtggttgaggtggagcatgaattctacgtcaaaaagggtggagccaaaaaaagacccgcccccagtgacgcagatataagtgagcccaaacgggtgcgcgagtcagttgcgcagccatcgacgtcagacgcggaagcttcgatcaactacgcggacaggtaccaaaacaaatgttctcgtcacgtgggcatgaatctgatgctgtttccctgcagacaatgcgagagaatgaatcagaattcaaatatctgcttcactcacggacagaaagactgtttagagtgctttcccgtgtcagaatctcaacccgtttctgtcgtcaaaaaggcgtatcagaaactgtgctacattcatcatattatgggaaaggtgccagacgcttgcactgcctgcgatctggtcaatgtggatttggatgactgcatctctgaacaataaatgatttaaatcaggtatggctgccgatggttatcttccagattggctcgaggacactctctctgaaggaataagacagtggtggaagctcaaacctggcccaccaccaccaaagcccgcagagcggcataaggacgacagcaggggtcttgtgcttcctgggtacaagtacctcggacccttcaacggactcgacaagggagagccggtcaacgaggcagacgccgcggccctcgagcacgacaaggcctacgaccggcagctcgacagcggagacaacccgtacctcaagtacaaccacgccgacgcggagtttcaggagcgccttaaagaagatacgtcttttgggggcaacctcggacgagcagtcttccaggcgaaaaagagggttcttgaacctctgggcctggttgaggaacctgttaagacggctccgggaaaaaagaggccggtagagcactctcctgtggagccagactcctcctcgggaaccggaaaagcgggccagcagcctgcaagaaaaagattgaattttggtcagactggagacgcagactccgtacctgacccccagcctctcggacagccaccagcagccccctctggtttgggatctactacaatggctacaggcagtggcgcaccagtggcagacaataacgagggtgccgatggagtgggtaattcctcaggaaattggcattgcgattcccaatggctgggcgacagagtcatcaccaccagcacccgaacctgggccctgcccacctacaacaaccacctctacaagcaaatctccagccaatcaggagcctcaaacgacaaccactactttggctacagcaccccttgggggtattttgacttcaacagattccactgccacttttcaccacgtgactggcaaagactcatcaacaacaactggggattccgacccaagagactcaacttcaagctctttaacattcaagtcaaagaggtcacgcagaatgacggtacgacgacgattgccaataaccttaccagcacggttcaggtgtttactgactcggagtaccagctcccgtacgtcctcggctcggcgcatcaaggatgcctcccgccgtttccagcggacgtcttcatggtcccacagtatggatacctcaccctgaacaacgggagtcaggcggtaggacgctcttccttttactgcctggagtactttccttctcagatgctgcgtactggaaacaactttcagttcagctacacctttgaagacgttcctttccacagcagctacgctcacagccagagtctggatcggctgatgaatcctctgatcgaccagtacctgtattatctgaacaaaacacaatcaaatagtggaactcttcagcagtctcggctactgtttagtcaagctggacccaccagcatgtctcttcaagctaaaaactggctgcctggaccttgctacagacagcagcgtctgtcaaagcaggcaaacgacaacaacaacagcaactttccctggactgcagctacaaagtatcatctaaatggccgggactcgttggttaatccaggaccagctatggccagccacaaagacgatgaagaaaagtttttccccatgcatggaaccctgatatttggtaaacaaggaacaaatgctaacgacgcggatttggacaatgtcatgattacagatgaagaagaaatccgcaccaccaatcccgtggctacggagcagtacggatatgtgtcaaataatttgcaaaactcaaatactggtccaactactggaactgtcaatcaccaaggagcgttacctggtatggtgtggcaggatcgagacgtgtacctgcagggacccatttgggccaagattcctcacaccgatggacactttcatccttctccgctgatgggaggttttgggctcaaacacccgcctcctcagatcatgatcaaaaacactccagttccagccaatcctcccacaaacttcagttctgccaagtttgcttctttcatcacacagtattccacggggcaagtcagcgtggagatcgagtgggagctgcagaaggagaacagcaaacgctggaaccccgagatccagtacacttccaactacaacaaatctgttaatgtggactttactgtggacactaatggtgtgtattcagagcctcgccccattggcaccagatacctgactcgtaatctgtaattgcttgttaatcaataaaccgtttaattcgttccagttgaactttggtctccgcgtacttcttttcttatctagtttccatggctacgtagataagtagcatggcgggttaatcattaactacaaggaacccctagtgatggagttggccactccctctctgcgcgctcgctcgctcactgaggccgggcgaccaaaggtcgcccgacgcccgggctttgcccgggcggcctcagtgagcgagcgagcgcgcagagagggagtggccaa

SEQ ID NO: 106 - DNA, 4683 bp, adeno-associated virus 2
ggactcgcggccgcaagtggataggtggagcgatttgaggtctatggtgtaaaaggaaatatcttcaccacctttggtcgcccggcctcagtgagcgagcgagcgcgcagagagggagtggccaactccatcactaggggttcctggaggggtggagtcgtgacgtgaattacgtcatagggttagggaggtcctgtattagaggtcacgtgagtgttttgcgacattttgcgacaccatgtggtcacgctgggtatttaagcccgagtgagcacgcagggtctccattttgaagcgggaggtttgaacgcgcagccgccatgccgggattttacgagattgtgattaaggtccccagcgaccttgacgagcatctgcccggcatttctgacagctttgtgaactgggtggccgagaaggaatgggagttgccgccagattctgacatggatctgaatctgattgagcaggcacccctgaccgtggccgaaaagctgcagcgtgactttctgacggagtggcgccgcgtgagtaaggccccggaggccctcttctttgtgcaatttgagaagggagagagttacttccacatgcacatgctggtggagaccaccggggtgaaatccatggttttgggacgtttcctgagtcagattcgcgaaaaactgattcagagaatttaccgcgggatcgagccgactttgccaaactggttcgcggtcacaaagacccgaaatggcgccggaggcgggaacaaggtggtggatgagtgctacatccccaattacctgctccccaaaacccagcctgagctccagtgggcgtggactaatatggaacagtatttaagcgcctgtttgaatctcgcggagcgtaaacggttggtggcgcagcatctgacgcacgtgtcgcagacgcaggagcagaacaaagagaatcagaatcccaattctgacgcgccggtgattagatcaaaaacatcagccaggtacatggagctggtcgggtggctcgtggataaggggattacctcggagaagcagtggatccaggaggaccaggcktcatacatctccttcaatgcggcctccaactcgcggtcccaaatcaaggctgctcttgacaatgcgggaaagatcatgagcctgactaaaaccgcccccgactacctggtgggccagcagcccgtggaggacatttccagcaatcggatttataaaatcttggaactgaacgggtacgatccccaatacgcggcttccgtctttctgggatgggccacgaaaaagttcggcaagaggaacaccatctggctgtttgggcctgcaaccaccgggaagaccaacatcgcggaggccatagcccacactgtgcccttctacgggtgcgtaaactggaccaatgagaactttcccttcaacgactgcgtcgacaagatggtgatctggtgggaggagggaaagatgactgccaaggtcgtggagtctgccaaagccattctcggaggaagcaaggtgcgcgtggaccagaaatgcaagtcctcggcccagatagacccgactcccgtgatcgtcacctccaacaccaacatgtgcgccgtgattgacgggaactcaacgaccttcgaacatcagcagccgttgcaagaccggatgttcaaatttgaactcacccgccgtctggatcatgactttgggaaggtcaccaagcaggaagtcaaagactttttccggtgggcaaaggatcacgtggttgaggtggagcatgaattctacgtcaaaaagggtggagccaaaaaaagacccgcccccagtgacgcagatataagtgagcccaaacgggtgcgcgagtcagttgcgcagccatcgacgtcagacgcggaagcttcgatcaactacgcggacaggtaccaaaacaaatgttctcgtcacgtgggcatgaatctgatgctgtttccctgcagacaatgcgagagaatgaatcagaattcaaatatctgcttcactcacggacagaaagactgtttagagtgctttcccgtgtcagaatctcaacccgtttctgtcgtcaaaaaggcgtatcagaaactgtgctacattcatcatattatgggaaaggtgccagacgcttgcactgcctgcgatctggtcaatgtggatttggatgactgcatctctgaacaataaatgatttaaatcaggtatggctgccgatggttatcttccagattggctcgaggacactctctctgaaggaataagacagtggtggaagctcaaacctggcccaccaccaccaaagcccgcagagcggcataaggacgacagcaggggtcttgtgcttcctgggtacaagtacctcggacccttcaacggactcgacaagggagagccggtcaacgaggcagacgccgcggccctcgagcacgacaaggcctacgaccggcagctcgacagcggagacaacccgtacctcaagtacaaccacgccgacgcggagtttcaggagcgccttaaagaagatacgtcttttgggggcaacctcggacgagcagtcttccaggcgaaaaagagggttcttgaacctctgggcctggttgaggaacctgttaagacggctccgggaaaaaagaggccggtagagcactctcctgtggagccagactcctcctcgggaaccggaaaagcgggccagcagcctgcaagaaaaagattgaattttggtcagactggagacgcagactccgtacctgacccccagcctctcggacagccaccagcagccccctctggtttgggatctactacaatggctacaggcagtggcgcaccagtggcagacaataacgagggtgccgatggagtgggtaattcctcaggaaattggcattgcgattcccaatggctgggcgacagagtcatcaccaccagcacccgaacctgggccctgcccacctacaacaaccacctctacaagcaaatctccagccaatcaggagcctcaaacgacaaccactactttggctacagcaccccttgggggtattttgacttcaacagattccactgccacttttcaccacgtgactggcaaagactcatcaacaacaactggggattccgacccaagagactcaacttcaagctctttaacattcaagtcaaagaggtcacgcagaatgacggtacgacgacgattgccaataaccttaccagcacggttcaggtgtttactgactcggagtaccagctcccgtacgtcctcggctcggcgcatcaaggatgcctcccgccgtttccagcggacgtcttcatggtcccacagtatggatacctcaccctgaacaacgggagtcaggcggtaggacgctcttccttttactgcctggagtactttccttctcagatgctgcgtactggaaacaactttcagttcagctacacctttgaagacgttcctttccacagcagctacgctcacagccagagtctggatcggctgatgaatcctctgatcgaccagtacctgtattatctgaacaaaacacaagcaaatagtggaactcttcagcagtctcggctactgtttagtcaagctggacccaccagcatgtctcttcaagctaaaaactggctgcctggaccttgctacagacagcagcgtctgtcaaagcaggcaaacgacaacaacaacagcaactttccctggactgcagctacaaagtatcatctaaatggccgggactcgttggttaatccaggaccagctatggccagccacaaagacgatgaagaagaaaagtttttccccatgcatggaaccctgatatttggtaaacaaggaacaaatgctaacgacgcggatttggacaatgtcatgattacagatgaagaagaaatccgcaccaccaatcccgtggctacggagcagtacgratatgtgtcaaataatttgcaaaactcaaatactggtccaactactggaactgtcaatcaccaaggagcgttacctggtatggtgtggcaggatcgagacgtgtacctgcagggacccatttgggccaagattcctcacaccgatggacactttcatccttctccgctgatgggaggttttgggctcaaacacccgcctcctcagatcatgatcaaaaacactccagttccttctccgctgatgggaggttttgggctcaaacacccgcctcctcagatcacacagtattccacggggcaagtcagcgtggagatcgagtgggagctgcagaaggagaacagcaaacgctggaaccccgagatccagtacacttccaactacaacaaatctgttaatgtggactttactgtggacactaatggtgtgtattcagagcctcgccccattggcaccagatacctgactcgtaatctgtaattgcttgttaatcaataaaccgtttaattcgttccagttgaactttggtctccgcgtacttcttttcttatctagtttccatggctacgtagataagtagcatggcgggttaatcattaactacaaggaacccctagtgatggagttggccactccctctctgcgcgctcgctcgaggaaaaaacttttcttcattttgtgcactgaggccgtttttgctttcttaagtaataggcttggaatttatcccggaatacatctcttaaagtt

SEQ ID NO: 107 - DNA, 4679 bp, adeno-associated virus 2
ttggccactccctctctgcgcgctcgctcgctcactgaggccgggcgaccaaaggtcgggcgtcgggcgaccttggcttgggcggcctcagtgagcgagcgagcgcgcagagagggagtggccaactccatcactaggggttcctggaggggtggagtcgtgacgtgaagtacgtcatagggttagggaggtcctgtattagaggtcacgtgagtgttttgcgacattttgcgacaccatgtggtcacgctgagtatttaagcccgagtgagcacgcagggtctccattttgaagcgggaggtttgaacgcgcagccgccatgccggggttttacgagattgtgattaaggtccccagcgaccttgacgagcatctgcccggcatttctgacagctttgtaaactgggtggccgagaaggaatgggagttgccgccagattctgacatggatctgaatctgattgagcaggcacccctgaccgtggccgagaagctgcagcgcgactttctgacggagtggcgccgcgtgagtaaagccccggaggccctcttctttgtgcaatttgagaagggagagagctatttccacatgcacgtgcttgtggagaccaccggagtgaaatccatggttttgggacgtttcctgagtcagattcgcgaaaaactgattcagagaatttaccgcgggatcgagccgactttgccaaactggttcgcggtcacaaagacccgaaatggcgccggaggcgggaacaaggtggtggatgagtgctacatccccaattacctgctccccaaaacccagcctgagctccagtgggcgtggactaatatggaacagtatttaagcgcctgtttgaatctcgcggagcgtaaacggttggtggcgcagcatctgacgcacgtgtcgcagacccaggagcagaacaaagagaatcagaatcccaattctgacgcgccggtgattagatcaaaaacctcagccaggtacatggagctggtcgggtggctcgtggacaaggggattacctcggagaagcagtggatccaggaggatcaggcttcatacatctccttcaatgcggcctccaactcgcggtcccagatcaaggctgctctggacaatgcgggaaagatcatgagcctgactaaaactgcccccgactacctggtgggccagcagcccgtggaggacatttccagcaatcggatttataaaatcttggaactgaacgggtacgatccccaatacgcggcttccgtatttctgggatgggccacgaaaaagttcggcaagaggaacaccatttggctgtttgggcctgcaactaccgggaagaccaacatcgcggaggccatagcccacactgtgcccttctacgggtgcgtaaactggaccaatgagaactttccgttcaatgactgcgtcgacaagatggtgatctggtgggaggagggaaagatgaccgccaaggtcgtggagtcggccaaagccattctcggaggaagcaaggtgcgcgtggaccagaaatgcaagtcctcggcccagatagacccgactcccgtgatcgtcacctccaacaccaacatgtgcgccgtgattgacgggaactcaacgaccttcgaacaccagcagccgttgcaagaccggatgttcaaatttgaactcacccgccgtctggatcatgactttgggaaggtcaccaagcaggaagtcaaagactttttccggtgggcaaaggatcacgtggttgaggtggagcatgaattctacgtcaaaaagggaggagccaagaaaagacccgcccccagtgacgcagatataagtgagcccaaacgggcgcgcgagtcagttgcgcagccatcaacgtcagacgcggaagcttcgatcaactacgcggacaggtaccaaaacaaatgttctcgtcacgtgggcatgaatctgatgctgtttccctgcagacaatgcgagagaatgaatcagaattcaaatatctgcttcactcacggacagaaagactgtttagagtgctttcccgtgtcagaatctcaacccgtttctgtcgtcaaaaaggcgtatcagaaactgtgctacattcatcatattatgggaaaggtgccagacgcttgcactgcctgcgatctggtcaatgtggatttggatgactgcatctctgaacaataaatgatttaaatcaggtatggctgccgatggttatcttccagattggctcgaggacactctctctgaaggaataagacagtggtggaagctcaaacctggcccaccaccaccaaagcccgcagagcggcataaggacgacagcaggggtcttgtgcttcctgggtacaagtacctcggacccttcaacggactcgacaagggagagccggtcaacgaggcagacgccgcggccctcgagcacgacaaggcctacgaccggcagctcgacagcggagacaacccgtacctcaagtacaaccacgccgacgcggagtttcaggagcgccttaaagaagatacgtcttttgggggcaacctcggacgagcagtcttccaggcgaaaaagagggttcttgaacctctgggcctggttgaggaacctgttaagacggctccgggaaaaaagaggccggtagagcactctcctgtggagccagactcctcctcgggaaccggaaaagcgggccagcagcctgcaagaaaaagattgaattttggtcagactggagacgcagactccgtacctgacccccagcctctcggacagccaccagcagccccctctggtctgggatctactacaatggctacaggcagtggcgcaccaatggcagacaataacgagggtgccgatggagtgggtaattcctcaggaaattggcattgcgattcccaatggctgggcgacagagtcatcaccaccagcacccgaacctgggccctgcccacctacaacaaccacctctacaagcaaatctccagccaatcaggagcctcaaacgacaaccactactttggctacagcaccccctgggggtattttgacttcaacagattccactgccacttttcaccacgtgactggcaaagactcatcaacaacaactggggattccgacccaagagactcaacttcaagctctttaacattcaagtcaaagaggtcacgcagaatgacggtacgacgacgattgccaataaccttaccagcacggttcaggtgtttactgactcggagtaccagctcccgtacgtcctcggctcggcgcatcaaggatgcctcccgccgttcccagcggacgtcttcatggtgccacagtatggatacctcaccctgaacaacgggagtcaggcagtaggacgctcttcattttactgcctggagtactttccttctcagatgcttcgtactggaaacaactttcagttcagctacacctttgaagacgttcctttccacagcagctacgctcacagccagagtctggatcggctgatgaatcctctgattgaccagtacctgtattatctgaacaaaacacaatcaaatagtggaactcttcagcagtctcggctactgtttagtcaagctggacccaccagcatgtctcttcaagctaaaaactggctgcctggaccttgctacagacagcagcgtctgtcaaagcaggcaaacgacaacaacaacagcaactttccctggactgcggctacaaagtatcatctaaatggccgggactcgttggttaatccaggaccagctatggccagccacaaagacgatgaagaaaagtttttccccatgcatggaaccctgatatttggtaaacaaggaacaaatgctaacgacgcggatttggacaatgtcatgattacagatgaagaagaaatccgcaccaccaatcccgtggctacggagcagtacggatatgtgtcaaataatttgcaaaactcaaatactggtccaactactggaactgtcaatcaccaaggagcgttacctggtatggtgtggcaggatcgagacgtgtacctgcagggacccatttgggccaagattcctcacaccgatggacactttcatccttctccgctgatgggaggttttggactcaaacacccacctcctcagatcatgatcaaaaacactccagttccagccaatcctcccacaaacttcagttctgccaagtttgcttctttcatcacacagtactccacggggcaggtcagcgtggagatcgagtgggagctgcagaaggagaacagcaaacgctggaaccccgagatccagtacacttccaactacaacaagtctgttaatgtggactttactgtggacactaatggtgtgtattcagagcctcgccccattggcaccagatacctgactcgtaatctgtaattgcttgttaatcaataaaccgtttaattcgtttcagttgaactttggtctctgcgtacttctttcttatgtagtttccatggctacgtagataagtagcatggcgggttaatcattaactctaaggaacccctagtgatggagttggccactccctctctgcgcgctcgctcgctcactgaggccgggcgaccaaaggtcgcccgacgcccgggctttgcccgggcggcctcagtgagcgagcgagcgcgcagagagggagtggccaa

SEQ ID NO: 108 - DNA, 4679 bp, adeno-associated virus 2
ttggccactccctctctgcgcgctcgctcgctcactgaggccgggcgtccaaaggtcgcccgacgggcgacctttggtcgcccggcctcagtgagcgagcgagcgcgcagagagggagtggccaactccatcactaggggttcctggaggggtggagtcgtgacgtgaagtacgtcatagggttagggaggtcctgtattagaggtcacgtgagtgttttgcgacattttgcgacaccatgtggttacgcagggtatttaagcccgagtgagcacgcagggtctccattttgaagcgggaggtttgaacgcgcagccgccatgccggggttttacgagattgtgattaaggtccccagcgaccttgacgagcatctgcccggcatttctgacagctttgtgaactgggtggccgagaaggaatgggagttgccgccagattctgacatggatctgaatgtgattgagcaggcacccctgaccgtggccgagaagctgcagcgcgactttctgacggaatggcgccgtgtgagtaaggccccggaggccctcttctttgtgcaatttgagaagggagagagctacttccacatgcacgtgcttgtggagaccaccggggtgaaatccatggttttgggacgtttcctgagtcagattcgcgaaaaactgattcagagaatttaccgcgggatcgagccgactttgccaaactggttcgcggtcacaaagacccgaaatggcgccggaggcgggaacaaggtggtggatgagtgctacatccccaattacctgctccccaaaacccagcctgagctccagtgggcgtggactaatatggaacagtatttaagcgcctgtttgaatctcgcggagcgtaaacggttggtggcgcagcatctgacgcacgtgtcgcagacgcaggagcagaacaaagagaatcagaatcccaattctgacgcgccggtgattagatcaaaaacctcagccaggtacatggagctggtcgggtggctcgtggataaggggattacgtcggagaagcagtggatccaggaggatcaggcttcatacatctccttcaatgcggcctccaactcgcggtcccaaatcaaggctgccttggacaatgcgggaaagatcatgagcctgactaaaactgcccccgactacctggtgggccagcagcccgtggaagacatttccagcaatcggatttataaaattttggaactgaacgggtacgatccccaatacgcggcttccgtctttctgggatgggccacgaaaaagttcggcaagagaaacaccatctggctgtttgggcctgcaactaccgggaagaccaacatcgcggaggccatagcccacactgtgcccttctacgggtgcgtaaactggaccaatgagaactttcccttcaacgactgtgttgacaagatggtgatctggtgggaggaggggaagatgaccgccaaggtcgtggagtcggccaaagccattctcggaggaagcaaggtgcgcgtggaccagaaatgcaagtcctcggcccagatagacccgactcccgtgatcgtcacctccaacaccaacatgtgcgccgtgattgacgggaactcaacgaccttcgagcaccagcagccgttgcaagaccggatgttcaaatttgaactcacccgccgtctggatcatgactttgggaaggtcaccaagcaggaagtcaaagactttttccggtgggcaaaggatcacgtggttgaggtggagcatgaattctacgtcaaaaagggtggagccaagaaaagacccgcccccagtgacgcagatataagtgagcccaaacgggcgcgcgagtcagttgcgcagccatcgacgtcagacgcggaagcttcgatcaactacgcggacaggtaccaaaacaaatgttctcgtcacgtgggcatgaatctgatgctgtttccctgcagacaatgcgagagaatgaatcaaaattcaaatatctgcttcactcacggacagaaagactgtttagagtgctttcccgtgtcagaatctcaacccgtttctgtcgtcaaaaaggcgtatcagaaactttgctacattcatcatatcatgggaaaagtgccagacgcttgcactgcctgcgatctggtcaatgtggatttggatgactgcatctctgaacaataaatgatttaaatcaggtatggctgccgatggttatcttccagattggctcgaggacactctctctgaaggaataagacagtggtggaagctcaaacctggcccaccaccaccaaagcccgcagagcggcataaggacgacagcaggggtcttgtgcttcctgggtacaagtacctcggacccttcaacggactcgacaagggagagccggtcaacgaggcagacgccgcggccctcgagcacgacaaggcctacgaccggcagctcgacagcggagacaacccgtacctcaagtacaaccacgccgacgcggagtttcaggagcgccttaaagaagatacgtcttttgggggcaacctcggacgagcagtcttccaggcaaaaaagagggttcttgaacctctgggcctggttgaggagcctgttaaaacggctccgggaaaaaagaggccggtagagcactctcctgcggagccagactcctcctcgggaatcggaaaagcgggccagcagcctgcaagaaaaagattgaatttcggtcagactggagacgcagactccgtacctgacccccagcctctcggacagccaccagcagccccctctggtctgggatctactacaatggctacaggcagtggcgcaccagtggcagacaataacgagggtgccgatggagtgggtaattcctcaggaaattggcattgcgattcccaatggctgggcgacagagtcatcaccaccagcacccgaacctgggccctgcccacctacaacaaccacctctacaagcaaatctccagccaatcaggagcctcaaacgacaaccactactttggctacagcaccccctgggggtattttgacttcaacagattccactgccacttttcaccacgtgactggcaaagactcatcaacaacaactggggattccgacccaaaagactcaacttcaagctctttaacattcaagtcaaagaggtcacgcagaatgacggtacgacgacgattgccaataaccttaccagcacggttcaggtgtttactgactcggagtaccagctcccgtacgtcctcggctcggcgcatcaaggatgcctcccgccgtttccagcggacgtcttcatggtgccacagtatggatacctcaccctgaacaacgggagtcaagcggtaggacgctcttcattttactgcctggagtactttccttctcagatgctgcgtaccggaaacaactttcagttcagctacacctttgaagacgttcctttccacagcagctacgctcacagccagagtctggatcggctgatgaatcctctgatcgaccagtacctgtattatctgaacaagacacaatcaaatagtggaactcttcagcagtctcggctactgtttagtcaagctggacccaccagcatgtctcttcaagctaaaaactggctgcctggaccttgctacagacagcagcgtctgtcaaagcaggcaaacgacaacaacaacagcaactttccctggactgcggctacaaagtatcatctaaatggccgggactcgttggttaatccaggaccagctatggccagccacaaagatgacgaagaaaagtttttccccatgcatggaaccctgatatttggtaaacaaggaacaaatgctaacgacgcggatttggacaatgtcatgattacagatgaagaagaaatcaggaccaccaatcccgtggctacggagcagtacggatatgtgtcaaataatttgcaaaactcaaatactggtccaactactggaactgtcaatcaccaaggagcgttacctggtatggtgtggcaggatcgagacgtgtacctgcagggacccatttgggccaagattcctcacaccgatggacactttcacccttctccactgatgggaggttttggactcaaacacccgcctcctcagatcatgatcaaaaacactcccgttccagccaatcctcccacaaatttcagttctgccaagtttgcttctttcatcacacagtactccacggggcaggtcagcgtggaaatcgagtgggagctgcagaaggagaacagcaaacgctggaatcccgaaattcagtatacttccaactacaacaaatctgttaatgtggactttactgtggacactaatggtgtgtattcagagcctcgccccattggcaccagatacctgactcgtaatctgtaattgcttgttaatcaataaaccgtttaattcgtttcagttgaactttggtctctgtgtacttcttttcttatatagtttccatggctacgtagataagtagcatggcggttaatcattaactctaaggaacccctagtgatggagttggccactccctctctgcgcgctcgctcgctcactgaggccgcgcgggcaaagcccggccgtcgggcgacctttgcccgggcgaccttagtgagcgagcgagcgcgcagagagggagtggccaa

SEQ ID NO: 109 - DNA, 4678 bp, adeno-associated virus 2
ttggccactccctctctgcgcgctcgctcgctcactgaggccgcccgggcaaagcccgggcgtcgggcgacctttggtcgcccggcctcagtgagcgagcgagcgcgcagagagggagtggccaactccatcactaggggttcctggaggggtggagtcgtgacgtgaagtacgtcatagggttagggaggtcctgtattagaggtcacgtgagtgttttgcgacattttgcgacaccatgtggtcacgctgggtatttaagcccgagtgagcacgcagggtctccattttgaagcgggaggtttgaacgcgcagccgccatgccggggttttacgagattgtgattaaggtccccagcgaccttgacgagcatttgcccggcatttctgacagctttgtgaactgggtggccgagaaggaatgggagttgccgccagattctgacatggatctgaatctgattgagcaggcacccctgaccgtggccgagaagctgcagcgcgactttctgacggaatggcgccgcgtgagtaaggccccggaggccctcttctttgtgcaatttgagaagggagagagctacttccacatgcacgtgctggtggagaccaccggggtgaaatccatggttttgggacgtttcctgagtcagattcgcgaaaaactgattcagagaatttaccgcgggatcgagccgactttgccaaactggttcgcggtcacaaagacccgaaatggcgccggaggcgggaacaaggtggtggatgagtgctacatccccaattacctgctccccaaaacccagcctgagctccagtgggcgtggactaatatggaacagtatttaagcgcctgtttgaatctcgctgagcgtaaacggttggtggcgcagcatctgacgcacgtgtcgcagacgcaggagcagaacaaagagaatcagaatctcaattctgacgcgccggttattagatcaaaaacctcagccaggtacatggagctggtcgggtggctcgtggataaggggattacgtcggagaagcagtggattcaggaagaccaggcttcatacatatccttcaatgcggcctccaactcgcggtcccagatcaaggctgccttggacaatgcgggaaagattatgagcctcactaaaactgcccccgactacctggtgggccagcagcccgtggaggacatttccagcaatcggatttataaaatcttggaactgaacgggtacgatccccaatacgcggcttccgtctttctgggatgggccacgaaaaagttcggcaagaggaacaccatctggctgtttgggcctgcaactaccgggaagaccaacatcgcggaggccatagcccacacggttcccttctacgggtgcgtaaactggaccaatgagaactttcccttcaatgactgcgtcgacaagatggtgatctggtgggaggaggggaagatgaccgccaaggtcgtagagtcggccaaagccattctcggaggaagcaaggtgcgcgtggaccagaaatgcaagtcctcggcccagatagacccgactcccgtgatcgtcacctccaacaccaacatgtgcgccgtgattgacgggaactcaacgaccttcgagcaccagcagccgttgcaagaccggatgttcaaatttgaacttacccgccgtctggatcatgactttgggaaggtcacaaagcaggaagtcaaagactttttccggtgggcaaaggatcacgtggttgaggtggagcatgaattctacgtcaaaaagggtggagccaagaaaagacccgcccccagtgacgcagatataagtgagcccaaacgggcgcgcgagtcagttgcgcagccatcgacgtcagacgcggaagcttcaatcaactacgcggacaggtaccaaaacaaatgttctcgtcacgtgggcatgaatctgatgctgtttccctgcagacaatgcgagagaatgaatcagaattcaaatatctgcttcactcacggacagaaagactgtttagagtgctttcccgtgtcagaatctcaacccgtttctgtcgtcaaaaaggcgtatcagaaactttgctacattcatcatatcatgggaaaggtgccagacgcttgcactgcctgcgatatggtcaatgtggatttggatgactgcatctctgaacaataaatgatttaaatcaggtatggctgccgatggttatcttccagattggctcgaggacactctctctgaaggaataagacagtggtggaagctcaaacctggcccaccaccaccaaagcccgcagagcggcataaggacaacagcaggggtcttgtgcttcctgggtacaagtacctcggacccttcaacggactcgacaagggagagccggtcaacgaggcagacgccgcggccctcgagcacgacaaggcctacgaccggcagctcgacagcggagacaacccgtacctcaagtacaaccacgccgacgcggagtttcaggagcgtcttaaagaagatacgtcttttgggggcaacctcggacgagcagtcttccaggcgaaaaagagggttcttgaacctctgggcctggttgaggagcctgttaagacggctccgggaaaaaagaggccggtagagcactctcctgtggagccagactcctcctcgggaaccggaaaagcgggccaacagcctgcgaaaaaaagactgaattttggtcagactggagacgcagactccgtacctgacccccagcctctcggacagccaccagcagccccctctggtctgggatctactacaatggctacaggcagtggcgcaccaatggcagacaataacgagggtgccgatggagtgggtaattcctcaggaaattggcattgcgattcccaatggctgggcgacagagtcatcaccaccagcacccgaacctgggccctgcccacctacaacaaccacctctacaagcaaatctccagccaatcaggagcctcaaacgacaaccactactttggctacagcaccccttgggggtattttgacttcaacagattccactgccacttttcaccacgtgactggcaaagactcatcaacaacaactggggattccgacccaaaagactcaacttcaagctctttaacattcaagtcaaagaggtcacgcagaatgacggtacgacgacgattgccaataaccttaccagcacggttcaggtgtttactgactcggagtaccagctcccgtacgtcctcggctcggcgcatcaaggatgcctcccgccgttcccagcggacgtcttcatggtcccacagtatggatacctcaccctgaacaacgggagtcaggcggtaggacgctcttccttttactgcctggagtactttccttctcagatgctgcgtactggaaacaactttcagttcagctacacctttgaagacgttcctttccacagcagctacgctcacagccagagtctggatcggctgatgaatcctctgattgaccagtacctgtattatctgaacaagacacaatcaaatagtggaactcttcagcagtctcggctactgtttagccaagctggacccaccaacatgtctcttcaagctaaaaactggctgcctggaccttgctacagacagcagcgtttatcaaagcaggcaaacgacaacaataacagcaactttccctggactgcagctacaaagtatcatctaaatggccgggactcgttggttaatccaggaccagctatggccagtcataaagacgatgaagaaaagtttttccccatgcatggaaccctgatatttggtaaacaaggaacaaatgccaacgacgcggatttggacaatgtcatgattacagatgaagaagaaatccgcaccacaaatcctgtagctacggagcagtacggatatgtgtcaaataatttgcaaaactcaaatactggtccaactactggaactgtcaatcaccaaggagcgttacctggtatggtgtggcaggatcgagacgtgtacctgcagggacccatatgggccaagattcctcacaccgatggacactttcatccttctccgctgatgggaggttttggactcaaacacccacctcctcagatcatgatcaaaaacactcccgttccagccaatcctcctacaaacttcagttctgccaagtttgcttctttcatcacacagtattccacgggacaggtcagcgtggagatcgagtgggagctgcagaaggagaacagcaaacgctggaaccccgagatccagtacacttctaactacaacaaatctgttaatgtggactttactgtggacactaatggtgtgtattcagagcctcgccccattggcaccagatacctgactcgtaatctgtaattgcttgttaatcaataaaccgtttaattcgtttcagttgaactttggtctttgcgtacttatttcttatctagtttccatggctacgtagataagtgccatggtgggttaatcattaactctaaggaacccctagtgatggagttggccactccctctctgcgcgctcgctcgctcactgaggccgcccgggcaaagcccgggcgtcgggcgacctttggtcgcccggcctcagtgagcgagattcaaacagagagggagtggccaa

SEQ ID NO: 110 - DNA, 4686 bp, adeno-associated virus 2
ttggccactccctctctgcgcgctcgctcgctcactgaggccgcccgggcaaagcccgggcgtcgggcgacctttggtcgcccggcctcagtgagcgagcgagcgcgcagagagggagtggccaactccatcactaggggttcctggaggggtggagtcgtgacgtgaagtacgtcatagggttagggaggtcctgtattagagatcacgtgagtgttttgcgacattttgcgacaccatgtggttacgcagggtatttaagcccgagtgagcacgcagggtctccattttgaagcgggaggtttgaacgcgcagccgccatgccggggttttacgagattgtgattaaggtccccagcgaccttgacgagcatctgcccggcatttctgacagctttgtaaactgggtggccgagaaggaatgggagttgccgccagattctgacatggatctgaatctgattgagcaggcacccctgaccgtggccgaaaagctgcagcgcgagtttctgacggaatggcgccgtgtgagtaaagccccggaggccctcttctttgtgcaatttgagaagggagagagctacttccacatgcacgtgctggtggagaccaccggggtgaaatccatggttttgggacgtttcctgagtcagattcgcgaaaaactgattcagagaatttaccgcgggatcgagccgactttgccaaactggttcgcggtcacaaagacccgaaatggcgccggaggcgggaacaaggtggtggatgagtgctacatccccaattacctgctccccaaaacccaacctgagctccagtgggcgtggactaatatggaacagtatttaagcgcctgtttgaatctcgcggagcgtaaacggttggtggcgcagcatctgacgcacgtgtcgcagacgcaggagcagaacaaagagaatcagaatcccaattctgacgcgccggtgattagatcaaaaacctcagccaggtacatggagctggtcgggtggctcgtggataaggggattacctccgagaagcagtggattcaggaggaccaggcctcatacatctccttcaatgcggcctccaactcgcggtcccaaatcaaggctgctctggacaatgcgggaaagatcatgagcctgactaaaacggcccccgactacctggtgggtcagcagcccgtggaggacatttccggcaatcggatttataagatcttggaactgaacgggtacgatccccaatacgcggcttccgtctttctgggatgggccacgaaaaagttcggcaagagaaacaccatctggctgtttgggcctgcaactaccgggaagaccaacatcgcggaggccatagcccacactgtgcccttttacgggtgcgtaaactggaccaatgagaactttccgttcaatgactgcgtcgacaagatggtgatctggtgggaggagggaaagatgaccgccaaggtcgtggagtcggccaaagccattctcggaggaagcaaggtgcgcgtggaccagaaatgcaagtcttcggcccagatcgacccgactcccgtgatcgtcacctccaacaccaacatgtgcgccgtgattgacgggaactcaacgaccttcgaacaccagcagccgttgcaagaccggatgttcaaatttgaactcacccgccgtctggatcatgactttgggaaggtcaccaagcaggaagtcaaagactttttccggtgggcaaaggatcacgtggttgaggtggagcatgaattctacgtcaaaaagggtggagctaagaaaaggcccgcccccagtgacgcagatataagtgagcccaaacgggcgcgcgagtcagttgcgcatccatcgacgtcagacgcggaagcttcgatcaactacgcggacaggtaccaaaacaaatgttctcgtcacgtgggcatgaatctgatgctgtttccctgcagacaatgcgagagaatgaatcagaattcaaatatctgctttactcacggacagaaagactgtttagagtgctttcccgtgtcagaatctcaacccgtttctgtcgtcaaaaagaagacttatcagaaactgtgtccaattcatcacattttgggaagagcacccgagattgcgtgttcggcctgcgatctggccaatgtggacttggatgactgtgtttctgaacaataaatgatttaaatcaggtatggctgccgatggttatcttccagattggctcgaggacactctctctgaaggaataagacagtggtggaagctcaaacctggcccaccaccaccaaagcccgcagagcggcataaggacgacagcaggggtcttgtgcttcctgggtacaagtacctcggacccttcaacggactcgacaagggagagccggtcaacgaggcagacgccgcggccctcgagcacgacaaggcctacgaccggcagctcgacagcggagacaacccgtacctcaagtacaaccacgccgacgcggagtttcaggagcgtcttaaagaagatacgtcttttgggggcaacctcggacgagcagtcttccaggcgaaaaagagggttcttgaacctctgggcctggttgaggaacctgttaagacggctccgggaaaaaagaggccggtagagcactctcctgcggagccagactcctcctcgggaaccggaaaggcgggcaaccagcctgcaagaaaaagactgaatttcggtcagactggagacgcagactccgtacctgacccccagcctatcggacagccaccagcagcccccacaagtttgggatctactacaatggctacaggcagtggcgcaccaatggcagacaataacgagggtgccgatggagtgggtaattcctcaggaaattggcattgcgattcccaatggctgggcgacagagtcattaccaccagcacccgaacctgggccctgcccacctacaacaaccacctctacaagcagatctccagccaatcaggagcttcaaacgacaaccactactttggctacagcaccccctgggggtattttgacttcaacagattccactgccacttttcaccacgtgactggcaaagactcatcaacaacaattggggattccggcccaaaagactcaacttcaagctctttaacattcaagtcaaggaggtcacgcagaatgacggtacgacgacgattgccaataaccttaccagcacggttcaggtgtttactgactcggagtaccagctcccgtacgtcctcggctcggcgcatcaaggatgcctcccgccgtttccagcggacgtcttcatggtcccacagtatggatacctcaccctaaacaacgggagtcaggcggtaggacgctcttccttttactgcctggagtactttccttctcagatgctgcgtactggaaacaactttcagttcagctacacctttgaagacgttcctttccacagcagctatgctcacagccagagtctggatcggctgatgaatcctctgatcgaccagtacctgtattatctgaacaagacacaatcaaatagtggaactgttcagcagtctcggctactgtttagccaagctggacccaccagcatgtctcttcaagctaaaaactggctgcctggaccttgctacagacagcagcgtctgtcaaagcaggcaagcgacaacaacaacagcaactttccctggactgcggctacaaagtatcatctaaatggccgggactcgttggttaatccaggaccagctatggccagtcacaaggatgacgaagaaaagtttttccccatgcatggaaccctgatatttggtaaagaaggaacaacttctaacaacgcggatttggaacatgtcatgattacagatgaagaagaaatcaggaccactaatccagtggctacggagcagtacggaaatgtgtcaaataatttgcaaaactcaaatactggtccaactactgaaaatgtcaataaccaaggagcgttacctggtatggtgtggcaggatagagacgtgtacctgcagggacccatttgggccaagattccacacacggacggacactttcatccttctccgcttatgggaggttttggactcaaacacccacctcctcaaatcatgatcaaaaacactcccgttccagccaatcctcctacaaacttcagtgcggcaaagtttgcttctttcatcacacagtactccacggggcaggtcagcgtggagatcgagtgggagctgcagaaagagaacagcaaacgctggaaccccgagatccagtacacttccaattacaacaaatctgttaatgtggactttactgtggacactaatggcgtgtattcagagcctcgccccattggcaccagatacctgactcgtaatctgtaattgcttgttaatcaataaaccgtttaattcgtttcagttgaactttggtctctgcgtacttcttttattatctagtttccatggctacgtagataagtagcatggcgggttaatcattaactctaaggaacccctagtgatggagttggccactccctctctgcgcgctcgctcgctcactgaggccgcccgggcaaagcccgggcgtcgggcgacctttggtcgcccggcctcagtgagcgagcgagcgcgcagagagggagtggccaa

SEQ ID NO: 111 - DNA, 4682 bp, adeno-associated virus 2
ttggccactccctctctgcgcgctcgctcgctcactgaggccgggcgaccaaaggtcgcccgacgcccgggctttgcccgggcggcctcagtgagcgagcgagcgcgcagagagggagtggccaactccatcactaggggttcctggaggggtggagtcgtgacgtgaagtacgtcatagggttagggaggtcctgtattagaggtcacgtgagtgttttgcgacattttgcgacaccatgtggttacgctgggtatttaagcccgagtgagcacgcagggtctccattttgaagcgggaggtttgaacgcgcagccgccatgccggggttttacgagattgtgattaaggtccccagcgaccttgacgagcatctgcccggtatttctgacagctttgtgaactgggtggccgagaaagaatgggagttgccgccagattctgacatggatctgaatctgattgagcaggcacccctgaccgtagccgagaaactgcagcgcgactttctgacagaatggcgccgtgtgagtaaggcccccgaggccctcttttttgtgcaatttgaaaagggagagagctacttccacatgcacgtgctggtggagaccaccggggtgaagtccatggttttgggacgtttcctgagtcagattcgcgaaaaactgattcagagaatttaccgcgggatcgagccgactttgccaaattggttcgcggtcacaaagacccgaaatggcgccggaggcgggaacaaggtggtggacgagtgctacatccccaattacctgctccctaaaacccagcctgagctccagtgggcgtggactaatatggaacagtatttaagcgcctgtttgaacctcgcggagcgtaaacggttggtggcgcagcatctgacgcacgtgtcgcagacccaggagcagaacaaagaaaatcagaatcccaattctgacgcgccggtgatcagatcaaaaacctcagccaggtacatggagctggtcgggtggctcgtggacaaggggattacctccgagaaacagtggattcaggaggaccaggcttcatacatctccttcaatgcggcctccaactcgcggtctcaaatcaaggctgctctggacaatgcgggaaagattatgagcctcactaaaaccgcccccgactacctggtgggccagcagcccgtggaggacatttccggcaatcggatttataaaatcttggaactgaacgggtacgatccccaatacgcggcttccgtctttctgggatgggccacgaaaaagttcggcaagaggaacaccatctggctgtttgggcctgcaactaccgggaagaccaacatcgcggaggccatagcccacacggtgcccttctacgggtgcgtaaactggaccaacgagaactttccctttaacgactgcgtcgacaagatggtgatttggtgggaggaggggaagatgaccgccaaggtcgtggaatcggccaaagccattctcggaggaagcaaggtgcgcgtggaccagaaatgcaagtcctcggcccagatagacccgactcccgtgatcgtcacctccaacaccaacatgtgcgccgtgattgacgggaactcaacgaccttcgagcaccagcagccgttgcaagaccggatgttcaaatttgaactcacccgccgtctggatcatgactttgggaaggtcaccaagcaggaagtcaaagactttttccggtgggcaaaggatcacgtggttgaggtggagcatgaattctacgtcaaaaagggtggagctaagaaaaggcccgcccccagtgacgcagatataagtgagcccaaacgggcgcgcgagtcagttgcgcagacatcgacgtcagacgcggaagcttcgatcaactacgcggacaggtaccaaaacaaatgttctcgtcacgtgggcatgaatctgatgctgtttccgtgcaaaacctgcgagagaatgaatcagatttcaaatgtctgtttcacgcacggtgtcaaagactgtggggagtgctttcccgtgtcaaaatctcaacccgtttctgtcgtcaaaaagaagacttatcagaaactgtgtccaattcatcacattttgggaagagcacccgagattgcgtgttcggcctgcgatatggccaatgtggacttggatgactgtgtttctgaacaataaatgacttaaaccaggtatggctgccgatggttatcttccagattggctcgaggacaacctcagtgaaggaattcgcgagtggtgggctttgaaacctggagcccctcaacccaaggcaaatcaacaacatcaagacaacgctcggggtcttgtgcttccgggttacaaataccttggacccggcaacggactcgacaagggggagccggtcaacgcagcagacgcggcggccctcgagcacgacaaggcatacgacaagcagctcaaggccggagacaacccgtacctcaagtacaaccacgccgacgcggagtttcaggagcgtcttaaagaagatacgtcttttgggggcaacctcggacgagcagtcttccaggcgaaaaagagggttctcgaacctctgggcctggttgaggaacctgttaagacggctccgggaaaaaagaggccggtagagcactctcctgcggagccagattcctcctccggaactggaaagtcgggccaacagcctgcaagaaaaagattgaattttggtcagactggagacgcagactccgtacctgacccccagcctctcggacagccaccagcagccccctctggtctgggatctactacaatggctacaggcagtggcgcaccaatggcagacaataacgagggtgccgatggagtgggtaattcctcaggaaattggcattgcgattcccaatggctgggcgacagagtcatcaccaccagcacccgaacctgggccctgcccacctacaacaatcacctctacaagcaaatctccagccaatcaggagcttcgaacgacaaccactactttggctacagcaccccttgggggtattttgacttcaacagattccactgccacttttcaccacgtgactggcaaagactcatcaacaacaactggggattccgacccaagagactcaacttcaagctctttaacattcaagtcaaagaggtcacgcagaatgacggtacgacgacgattgccaataaccttaccagcacggttcaggtgtttactgactcggagtaccagctcccgtacgtcctcggctcggcgcatcaaggatgcctcccgccgtttccagcggacgtcttcatggtgccacagtatggatacctcaccctaaacaacgggagtcaggcggtaggacgctcttccttttactgcctggagtactttccttctcagatgctgcgtacaggaaacaactttcagttcagctacacttttgaagacgtgcctttccacagcagctacgctcacagccagagtctggatcggctaatgaatcctctgatcgaccagtacctgtattatctaaacaggacacaaacagccagtggaactcagcagtctcggctactgtttagccaagctggacccaccagcatgtctcttcaagctaaaaactggctgcctggaccttgctacagacaacagcgtttgtcaaagcaggcaaacgacaacaacaatagcaactttccctggactgcggctacaaagtaccacctcaatggcagagactctctggtgaatccgggccctgctatggccagtcacaaagacgatgaagaaaagtttttccccatgcatggaaccctgatatttggtaaagaaggaacaaatgctaccaacgcggatttggacaatgtcatgattacagatgaagaagaaatccgcaccacaaatcctgtagctacggagcagtatggatatgtgtcaaataatttgcaaaactcaaatactgctgcaactactgaaactgtcaatcaccaaggagcgttacctggtatggtgtggcaggatagagacgtgtacctgcagggacccatttgggccaaaattcctcacaccgatggacactttcatccttctccgctgatgggaggttttggactcaaacacccacctcctcagatcatgatcaaaaacactcccgttccagccaatcctcccacaaactttagtgcggcaaagtttgcttctttcatcacacagtattccacggggcaagtcagcgtggagatcgagtgggagctgcagaaggagaacagcaaacgctggaaccccgagatccagtacacttccaactacaacaaatctgttaatgtggactttactgtggacactaatggtgtgtattcagagcctcgccccattggcaccagatacctgactcgtaatctgtaattgcttgttaattaataaaccgtttaattcgtttcagttaaactttggtctctgcgtacttctttcttatctagtttccatggctacgtagataagtaccatggcgggttaatcattaactctaaggaacccctagtgatggagttggccactccctctctgcgcgctcgctcgctcactgaggccgcccgggcaaagcccgggcgtcgggcgacctttggtcgcccggcctcagtgagcgagcgagcgcgcagagagggagtggccaa

SEQ ID NO: 112 - DNA, 4678 bp, adeno-associated virus 2
ttggccactccctctctgcgcgctcgctcgctcactgaggccgcccgggcaaagcccgggcgtcgggcgacctttggtcgcccggcctcagtgagcgagcgagcgcgcagagagggagtggccaactccatcactaggggttcctggaggggtggagtcgtgacgtgaagtacgtcatagggttagggaggtcctgtattagaggtcacgtgagtgttttgcgacattttgcgacaccatgtggtcacgctggtatttaagcccgagtgagcacgcagggtctccattttgaagcgggaggtttgaacgcgcagccgccatgccgggattttacgagattgtgattaaggtccccagcgaccttgacgagcatctgcccggcatttctgacagctttgtgaactgggtggccgagaaggaatgggagttgccgccagattctgacatggatctgaatctgattgagcaggcacccctgaccgtggccgagaagctgcagcgcgactttctgacggagtggcgccgcgtgagtaaggccccggaggccctcttctttgtgcaatttgagaagggagagagctacttccacatgcacgtgcttgtggaaactaccggggtgaaatccatggttttgggacgtttcctgagtcagattcgcgaaaaactgattcagagaatttaccgcgggatcgagccgactttgccaaactggttcgcggtcacaaagacccgaaatggcgccggaggcgggaacaaggtggtggatgagtgctacatccccaattacctgctccccaaaacccaacctgagctccagtgggcgtggactaatatggaacagtatttaagcgcctgtttgaatctcgcggagcgtaaacggttggtggcgcagcatctgacgcacgtgtcgcagacgcaggagcagaacaaagagaatcagaatcccaattctgacgcgccggtgatcagatcaaaaacctcagccaggtacatggagcttgtcgggtggctcgtggataaggggattacgtcggagaagcagtggatccaggaggaccaggcttcatacatctccttcaatgcggcctccaactcgcggtctcaaatcaaggctgctctggacaatgcggggaagattatgagcctgactaaaaccgcccccgactacctggtgggccagcagcccgtggaggacatttccagcaatcggatttataaaatcttggaactgaacgggtacgatccccaatatgcggcttccgtctttctgggatgggccacgaaaaagttcggcaagaggaacaccatctggctgtttgggcctgcaactaccgggaagaccaacatcgcggaggccatagcccacactgtgcccttctacgggtgcgtaaactggaccaatgagaactttcctttcaatgattgcgtcgacaagatggtgatctggtgggaggagggaaagatgaccgccaaggtcgtggagtcggccaaagccattctcggaggaagcaaggtgcgcgtggaccagaaatgcaagtcctcggcccagatagacccgactcccgtgatcgtcacttcaaacaccaacatgtgcgccgtgattgacgggaactcaacgaccttcgagcaccagcagccgttgcaagaccggatgttcaaatttgaactcacccgccgtctggatcatgactttgggaaggtcaccaagcaggaagtgaaagactttttccggtgggcaaaggatcacgtggttgaggtggagcatgaattctacgtcaaaaagggtggagccaagaaaagacccgcccccagtgacgcagatataagtgagcccaaacgggcgcgcgagtcagttgcacagccatcgacgtcagacgcggaagcttcgatcaactacgcggacaggtaccaaaacaaatgttctcgtcacgtgggcatgaatctgatgctgtttccctgcagacaatgcgagagaatgaatcagaattcaaatatctgcttcactcacggacagaaagactgtttagagtgctttcccgtgtcagaatctcaacccgtttctgtcgtcaaaaaggcgtatcagaaactttgctacattcatcatatcatgggaaaggtgccagacgcttgcactgcctgcgatctggtcaatgtggatttggatgactgcatctctgaacaataaatgatttaaatcaggtatggctgccgatggttatcttccagattggctcgaggacactctctctgaaggaataagacagtggtggaagctcaaacctggcccaccaccaccaaagcccgcagagcggcataaggacgacagcaggggtcttgtgcttcctgggtacaagtacctcggacccttcaacggactcgacaagggagagccggtcaacgaggcagacgccgcggccctcgagcacgacaaggcctacgaccggcagctcgacagcggagacaacccgtacctcaagtacaaccacgccgacgcggagtttcaggagcgccttaaagaagatacgtcttttgggggcaacctcggacgagcagtcttccaggcgaaaaagagggttcttgaacctctgggcctggttgaggaacctgttaagacggctccgggaaaaaagaggccggtagagcactctcctgtggagccagactcctcctcgggaaccggaaaagcgggcaaccagcctgcaagaaaaagattgaattttggtcagactggagacgcagactccgtacctgacccccagcctctcggacaaccaccagcagccccctctggtctgggatctactacaatggctacaggcagtggcgcaccagtggcagacaataacgagggtgccgatggagtgggtaattcctcaggaaattggcattgcgattcccaatggctgggcgacagagtcatcaccaccagcacccgaacctgggctctgcccacctacaacaaccacctctacaagcaaatctccagccaatcaggagcttcaaacgacaaccactattttggctacagcaccccctgggggtattttgacttcaacagattccactgccacttttcaccacgtgactggcaaagactcatcaacaacaactggggattccgacccaagagactcaacttcaagctctttaacattcaagtcaaagaggtcacgcagaatgacggtacgacgacgattgccaataaccttaccagcacggttcaggtgtttactgactcggagtaccagctcccgtacgtcctcggctcggcgcatcaaggatgcctcccgccgtttccagcggacgtcttcatggtcccacagtatggatacctcaccctgaacaacgggagtcaggcggtaggacgctcttccttttactgcctggagtactttccttctcagatgctgcgtactggaaacaactttcagtttagctacacctttgaagacgttcctttccacagcagctacgctcacagccagagtctggatcggctgatgaatcctctgattgaccagtacctgtattatctaaacaagacacaatcaaatagtggaactcttcaacagtctcggctactgtttagtcaagctggacccaccagcatgtctcttcaagctaaaaactggctgcctggaccttgctacagacagcagcgtctgtcaaagcaggcaaacgacaacaacaacagcaactttccctggactgcggctacaaagtatcatctaaatggccgggactcgttggttaatccaggaccagctatggccagccacaaagacgatgaagaaaagtttttccccatgcatggaaccctgatatttggtaaacaaggaacaaatgctaacgacgcggatttggacaatgtcatgattacagatgaagaagaaatccgcaccaccaatcccgtggctacggagcagtacggatatgtgtcaaataatttgcaaaactcaaatactggtccaactactggaactgtcaatcaccaaggagcgttacctggtatggtgtggcaggatcgagacgtgtacctgcagggacccatttgggccaagattcctcacaccgatggacactttcatccttctccactgatgggaggttttgggctcaaacacccgcctcctcagatcatgatcaaaaacactcccgttccagccaatcctcctacaaacttcagttctgccaagtttgcttctttcatcacacagtactccacggggcaggtcagcgtggagatcgagtgggagctgcagaaggagaacagcaaacgctggaaccccgagattcagtacacttccaactacaacaaatctgttaatgtggactttactgtggacactaatggtgtgtattcagagcctcgccccattggcaccagatacctgactcgtaatctgtaattgcttgttaatcaataaaccgtgtaattcgtttcagttgaactttggtctctgcgtacttttttcttatctagtttccatggctacgtagataagtagcatggcggggtaatcattaactctaaggaacccctagtgatggagttggccactccctctctgcgcgctcgctcgctcactgaggccgggcgaccaaaggtcgggcgtcgcccgggctttgcccgggcggcctcagtgagcgagcgagcgcgcagagagggagtggccaa

SEQ ID NO: 113 - DNA, 4679 bp, adeno-associated virus 2
ttggccactccctctctgcgcgctcgctcgctcactgaggccgggcgaccaaaggtcgcccgacgcccgggctttgcccgggcggcctcagtgagcgagcgagcgcgcagagagggagtggccaactccatcactaggggttcctggaggggtggagtcgtgacgtgaagtacgtcatagggttagggaggtcctgtattagaggtcacgtgagtgttttgcgacattttgcgacaccatgtggtcacgctgggtatttaagcccgagtgagcacgcagggtctccattttgaagcgggaggtttgaacgcgcagccgccatgccgggattttacgagattgtgattaaggtccccagcgaccttgacgagcatctgcccggcatttctgacagctttgtgaactgggtggccgagaaggaatgggagttgccgccagattctgacatggatttgaatctgattgagcaggcacccctgaccgtggccgagaagctgcagcgcgactttctgacggaatggcgccgtgtgagtaaggccccggaggccctcttctttgtgcaatttgagaagggagagagctacttccacatgcacgtgctggtggaaaccaccggggtgaaatctatggttttgggacgtttcctgagtcagattcgcgaaaaactgattcagagaatttaccgcgggatcgagccgactttgccaaactggttcgcggtcacaaagacccgaaatggcgccggaggcgggaacaaggtggtggatgagtgctacatccccaattacctgctccccaaaacccagcctgagctccagtgggcgtggactaatatggaacagtatttaagcgcctgtttgaatctcgcggagcgtaaacggttggtggcgcagcatctgacgcatgtatcgcagacgcaggagcagaacaaagagaatcagaatcccaattctgacgcgccggtgatcagatcaaaaacctcagccaggtacatggagcttgtcgggtggctcgtggataaggggattacctcggagaagcagtggatccaggaggaccaggcctcatacatctccttcaatgcggcctccaactcgcggtcgcagatcaaggctgctctggacaatgcgggaaagatcatgagcctgactaaaacggcccccgactacctggtgggccagcaacccgtggaggacatttccagcaatcggatttataaaatcttggaactgaacgggtatgatccccaatacgcggcttccgtctttctgggatgggctacgaaaaagttcggcaagaggaacaccatctggctgtttgggcctgcaactaccgggaagaccaacatcgcggaggctatagcccacactgtgcccttttacgggtgcgtgaactggaccaatgagaactttcctttcaacgattgcgtcgacaagatggtgatctggtgggaggaggggaagatgaccgccaaggtcgtggagtcggccaaagccattctcggaggaagcaaggtgcgcgtggaccagaaatgcaagtcctcggcccagatagacccgactcccgtgatcgtcacctccaacaccaacatgtgcgccgtgattgacgggaactcaacgaccttcgaacaccagcagccgttgcaagaccggatgttcaaatttgaactcacccgccgtctggatcatgactttgggaaggtcaccaagcaggaagtcaaagactttttccggtgggcaaaggatcacgtggttgaggtggagcatgaattctacgtcaaaaagggtggagccaagaaaagacccgcccccagtgacgcagatataagtgagcccaaacgggtgcgcgagtcagttgcgcagccatcgacgtcagacgcggaagcttcgatcaactacgcggacaggtaccaaaacaaatgttctcgtcacgtgggcatgaatctgatgctgtttccctgcagacaatgcgagagaatgaatcagaattcaaatatctgcttcactcacggacagaaagactgtttagagtgctttcccgtgtcagaatctcaacccgtttctgtcgtcaaaaaggcgtatcagaaactgtgctacattcatcatatcatgggaaaggtgccagacgcttgcactgcctgcgatctggtcaatgtggatttggatgactgcatctctgaacaataaatgatttaaatcaggtatggctgccgatggttatcttccagattggctcgaggacactctctctgaaggaataagacagtggtggaagctcaaacctggcccaccaccaccaaagcccgcagagcggcataaggacgacagcaggggtcttgtgcttcctgggtacaagtacctcggacccttcaacggactcgacaagggagagccggtcaacgaggcagacgccgcggccctcgagcacgacaaggcctacgaccggcagctcgacagcggagacaacccgtacctcaagtacaaccacgccgacgcggagtttcaggagcgccttaaagaagatacgtcttttgggggcaacctcggacgagcagtcttccaggcgaaaaagagggttcttgaacctctgggcctggttgaggaacctgttaagacggctccgggaaaaaagaggccggtagagcactctcctgtggagccagactcctcctcgggaaccggaaaggcgggccagcagcctgcaagaaaaagattgaattttggtcagactggagacgcagactccgtacctgacccccagcctctcggacagccaccagcagccccctctggtctgggatctactacaatggctacaggcagtggcgcaccagtggcagacaataacgagggtgccgatggagtgggtaattcctcaggaaattggcattgcgattcccaatggctgggcgacagagtcatcaccaccagcacccgaacctgggctctgcccacctacaacaaccacctctacaagcaaatctccagccaatcaggagccagcaacgacaaccactactttggctacagcaccccctgggggtattttgacttcaacagattccactgccacttttcaccacgtgactggcaaagactcatcaacaacaactggggattccggcccaagagactcaacttcaagctctttaacattcaagtcaaagaggtcacgcagaatgacggtacgacgacgattgccaataaccttaccagcacggttcaggtgtttactgactcggagtaccagctcccgtacgtcctcggctcggcgcatcaaggatgcctcccgccgttcccagcagacgtcttcatggtcccacagtatggatatctcaccctgaacaacgggagtcaggcggtaggacgctcttccttttactgcctggagtactttccttctcagatgctgcgtactggaaacaactttcagtttagctacacctttgaagacgttcctttccacagcagctacgctcacagccagagtctggatcggctgatgaatcctctgatcgaccagtacctgtattatctgaacaagacacaatcaaatagtggaactcttcagcagtctcggctactgtttagccaagctggacccaccagcatgtctcttcaagctaaaaactggctgcctggaccttgctacagacagcagcgtctgtcaaagcaggcaaacgacaacaacaacagcaactttccctggactgcggctacaaagtatcatctaaatggccgggactcgttggttaatccaggaccagctatggccagccacaaagacgatgaagaaaagtttttccccatgcatggaaccctgatatttggtaaacaaggaacaaatgctaacgacgcggatttggacaatgtcatgattacagatgaagaagaaatccgcaccaccaatccagtggctacggagcagtacggatatgtgtcaaataatttgcaaaactcaaatactggtccaactactggaactgtcaatcaccaaggagcgttacctggtatggtgtggcaggatcgagacgtgtacctgcagggacccatttgggccaagattcctcacaccgatggacactttcatccttctccactgatgggaggttttggactcaaacacccacctcctcagatcatgatcaaaaacactcccgttccagccaatcctcctacaaacttcagttctgccaagtttgcttctttcatcacacagtattccacggggcaggtcagcgtggagatcgagtgggagctgcagaaggagaacagcaaacgctggaatcccgagattcagtacacttccaactacaacaaatctgttaatgtggactttactgtggacactaatggtgtgtattcagagcctcgccccattggcaccagatacctgactcgtaatctgtaattgcttgttaatcaataaaccgtttaattcgtttcagttgaactttggtctctgtgtgcttctttcttatctagtttccatggctacgtagataagtaccatggcgggttaatcattaactctaaggaacccctagtgatggagttggccactccctctctgcgcgctcgctcgctcactgaggccgggcgaccaaaggtcgcccgacgcccgggctttgcccgggcggcctcagtgagcgagcgagcgcgcagagagggagtggccaa

SEQ ID NO: 114 - DNA, 4680 bp, adeno-associated virus 2
ttggccactccctctctgcgcgctcgctcgctcactgaggccgggcgaccaaaggtcgcccgacgcccgggctttgcccgggcggcctcagtgagcgagcgagcgcgcagagagggagtggccaactccatcactaggggttcctggaggggtggagtcgtgacgtgaattacgtcatagggttagggaggtcctgtattataggtcacgtgagtgttttgcgacattttgcgacaccatgtggttacgctgggtatttaagcccgagtgagcacgcagggtctccattttgaagcgggaggtttgaacgcgcagccgccatgccgggattttacgagattgtgattaaggtccccagcgaccttgacgagcatctgcccggcatttctgacagctttgtgaactgggtggccgagaaggaatgggagttgccgccagattctgacatggatctgaatctgattgagcaggcacccctgaccgtggccgagaagctgcagcgcgactttctgacggagtggcgccgtgtgagtaaggccccggaggctcttttctttgtgcaatttgagaagggagagagctacttccacatgcacgtgcttgtggagaccaccggggtgaaatccatggttttgggacgtttcctgagtcagattcgcgaaaaactgattcagagaatttaccgcgggatcgagccgactttgccaaactggttcgcggtcacaaagacccgaaatggcgccggaggcgggaataaggtggtggatgagtgctacatccccaattacctgctccccaaaacccagcctgagctccagtgggcgtggactaatatggaacagtatttaagcgcctgtttgaatctcgcggagcgtaaacggttggtggcgcagcatctgacgcacgtgtcgcagacgcaggagcagaacaaagagaatcagaatcccaattctgacgcgccggtgattagatcaaaaacctcagccaggtacatggagctggtcgggtggctcgtggataaggggattacctcggagaagcagtggatccaggaggaccaggcttcatacatctccttcaatgcggcctccaactcgcggtcccagatcaaggctgccttggacaatgcgggaaagatcatgagcctgactaaaaccgcccccgactacctggtgggccagcagcccgtggaggacatttccagcaatcggatttataaaatcttggaactgaacggatacgatccccattacgcggcttccgtctttctgggatgggccactaaaaagttcggcaagaggaacaccatctggctgtttgggcctgcaactaccgggaagaccaacatcgcggaggccatagcccacactgtgcccttctacgggtgcgtaaactggaccaatgagaactttccgttcaatgattgcgtcgacaagatggtgatttggtgggaggagggaaagatgaccgccaaggtcgtggagtcggccaaagccattctcggcggaagcaaggtgcgcgtggaccaaaagtgcaagtcttcggcccagatcgacccgactcccgtgatagtcacctccaacaccaacatgtgcgccgtgattgacgggaactcaacgaccttcgaacaccagcagccgttgcaagaccggatgttcaaatttgaactcacccgccgtctggatcatgactttgggaaggtcaccaagcaggaagtcaaagactttttccggtgggcaaaggatcacgtggttgaggtggagcatgaattctacgtcaaaaagggtggagccaagaaaagacccgcccccagtgacgcagatataagtgagcccaaacgggcgcgcgagtcagttgcgcagccatcgacgtcagacgcggaagcttcgatcaactacgcggacaggtaccaaaacaaatgttctcgtcacgtgggcatgaatctgatgctgtttccctgcagacaatgcgagagaatgaatcagaattcaaatatctgcttcactcacggacagaaagactgtttagagtgctttcccgtgtcagaatctcaacccgtttctgtcgtcaaaaaggcgtatcagaaactgtgctacattcatcacatcatgggaaaggtgccagacgcttgcactgcttgcgacctggtcaatgtggacttggatgactgtgtttctgaacaataaatgacttaaaccaggtatggctgccgatggttatcttccagattggctcgaggacactctctctgaaggaataagacagtggtggaagctcaaacctggcccaccaccaccaaagcccgcagagcggcataaggacgacagcaggggtcttgtgcttcctgggtacaagtacctcggacccttcaacggactcgacaagggagagccggtcaacgaggcagacgccgcggccctcgagcacgacaaggcctacgaccggcagctcgacagcggagacaacccgtacctcaagtacaaccacgccgacgcggagtttcaggagcgccttaaagaagatacgtcttttgggggcaacctcggacgagcagtcttccaggcgaaaaagagggttcttgaacctctgggcctggttgaggaacctgttaagacggctccgggaaaaaagaggccggtagagcactctcctgtggagccagactcctcctcgggaaccggaaaagcgggccagcagcctgcaagaaaaagattgaattttggtcagactggagacgcagactccgtacctgacccccagcctctcggacagccaccagcagccccctctggtttgggatctactacaatggctacaggcagtggcgcaccagtggcagacaataacgagggtgccgatggagtgggtaattcctcaggaaattggcattgcgattcccaatggctgggcgacagagtcatcaccaccagcacccgaacctgggctctgcccacctacaacaaccacctctacaagcaaatctccagccaatcaggagccagcaacgacaaccactactttggctacagcaccccctgggggtattttgacttcaacagattccactgccacttttcaccacgtgactggcaaagactcatcaacaacaactggggattccggcccaagagactcaacttcaagctctttaacattcaagtcaaagaggtcacgcagaatgacggtacgacaacgattgccaataaccttaccagcacggttcaggtgtttactgactcggagtaccagctcccgtacgtcctcggctcggcgcatcaaggatgcctcccgccgttcccagcagacgtcttcatggtcccacagtatggatacctcaccctgaacaacgggagtcaggcagtaggacgctcttcattttactgcctggagtactttccttctcagatgctgcgtactggaaacaactttcagttcagctacacctttgaagacgttcctttccacagcagctacgctcacagccagagtctggatcggctgatgaatcctctgatcgaccagtacctgtattatctgaacaaaacacaatcaaatagtggaactcttcagcagtctcggctactgtttagtcaagctggacccaccagcatgtctcttcaagctaaaaactggctgcctggaccttgctacagacagcagcgtctgtcaaagcaggcaaacgacaacaacaacagcaactttccctggactgcggctacaaagtatcatctaaatggccgggactcgttggttaatccaggaccagctatggccagccacaaagacgatgaagaaaagtttttccccatgcatggaaccctgatatttggtaaacaaggaacaaatgctaacgacgcggatttggacaatgttatgattacagatgaagaagaaatccgcaccaccaatcccgtggctacggagcagtacggatatgtgtcaaataatttgcaaaactcaaacactggtccaactactggaactgtcaatcaccaaggagcgttacctggtatggtgtggcaggatcgagacgtgtacctgcagggacccatttgggccaagattcctcacacggacggacattttcatccttctccactgatgggaggttttgggctcaaacacccgcctcctcagatcatgatcaaaaacactcccgttccagccaatcctcctacaaacttcagttctgccaagtttgcttctttcatcacacagtattccacggggcaggtcagcgtggagatcgagtgggagctacagaaggagaacagcaaacgctggaatcccgaaattcagtatacttccaactacaacaaatctgttaatgtggactttactgtggacactaatggtgtgtattcagagcctcgccccattggcaccagatacctgactcgtaatctgtaattgcttgttaatcaataaaccgtttaattcgtttcagttgaactttggtctctgcgtacttcttttcttatctagtttccatggctacgtagataagtagcatggagggttaatcattaactacaaggaacccctagtgatggagttggccactccctctctgcgcgctcgctcgctcactgaggccgggcgaccaaaggtcgcccgacgcccgggctttgcccgggcggcctcagtgagcgagcgagcgcgcagagagggagtggccaa

SEQ ID NO: 115 - DNA, 4679 bp, adeno-associated virus 2
ttggccactccctctctgcgcgctcgctcgctcactgaggccgggcgaccaaaggtcgcccgacgcccgggctttgcccgggcggcctcagtgagcgagcgagcgcgcagagagggagtggccaactccatcactaggggttcctggaggggtggagtcgtgacgtgaattacgtcatagggttagggaggtcctgtattagaggtcacgtgagtgttttgcgacattttgcgacaccatgtggtcacgctgggtatttaagcccgagtgagcacgcagggtctccattttgaagcgggaggtttgaacgcgcagccgccatgccgggattttacgagattgtgattaaggtccccagcgaccttgacgagcatctgcccggcatttctgacagctttgtgaactgggtggccgagaaggaatgggagttgccgccagattctgacatggatctgaatctgattgagcaggcacccctgaccgtggccgagaagctgcagcgcgactttctgacggagtggcgccgtgtgagtaaggccccggaggcccttttctttgtgcaatttgagaagggagagagctacttccacatgcacgtgcttgtggagaccaccggggtgaaatccatggttttgggacgtttcctgagtcagattcgcgaaaaactgattcagagaatttaccgcggaatcgagccgactttgccaaactggttcgcggtcacaaagaccagaaatggcgccggaggcgggaacaaggtggtggatgagtgctacatccccaattacctgctccccaaaacccagcctgagctccagtgggcgtggactaatatggaacagtatttaagcgcctgtttgaatctcgcggagcgtaaacggttggtggcgcagcatctgacgcacgtgtcgcagactcaggagcagaacaaggagaatcagaatcccaattctgacgcgccggtgatcagatcaaaaacctcagccaggtacatggagctggtcgggtggctcgtggataaggggattacgtcggagaagcagtggatccaggaggaccaggcttcatacatctccttcaatgcggcctccaactcgcggtcccaaatcaaggctgctctggacaatgcgggaaagatcatgagcctgactaaaaccgctcccgactacctggtgggccagcagcccgtggaggacatttccagcaatcggatttataaaatcttggaactgaacgggtacgacccccaatacgcggcttccgtctttctgggatgggccacgaaaaagttcggcaagaggaacaccatctggctgtttgggcctgcaactaccgggaagaccaacatcgcggaggccatagcccacactgtgcccttctacgggtgcgtaaactggaccaatgagaactttcctttcaatgattgcgtcgacaagatggtgatctggtgggaggaggggaagatgaccgccaaggtcgtggagtcggccaaagccattctcggaggaagcaaggtgcgcgtggaccagaaatgcaagtcctcggcccagatagacccgactcccgtgatcgtcacctccaacaccaacatgtgcgccgtgattgacgggaactcaacgaccttcgagcaccagcagccgttgcaagaccggatgttcaaatttgaactcacccgccgtctggatcatgactttgggaaggtcaccaagcaggaagtcaaagactttttccggtgggcaaaggatcatgtggttgaggtggagcatgaattctacgtcaaaaagggtggagccaagaaaagacccgcccccagtgacgcagatataagtgagcccaaacgggcgcgcgagtcagttgcgcagccatcgacgtcagaagcggaagcttcgatcaactacgcggacaggtaccaaaacaaatgttctcgtcacgtgggcatgaatctgatgctgtttccctgcagacaatgcgaaagaatgaatcagaattcaaatatctgcttcactcacggacagaaagactgtttagagtgctttcccgtgtcagaatctcaacccgtttctgtcgtcaaaaaggcgtatcagaaactttgctacattcatcatatcatgggaaaggtgccagacgcttgcactgcctgcgatctggtcaatgtggatttggatgactgcatctctgaacaataaatgatttaaatcaggtatggctgccgatggttatcttccagattggctcgaggacactctctctgaaggaataagacagtggtggaagctcaaacctggcccaccaccaccaaagcccgcagagcggcataaggacgacagcaggggtcttgtgcttcctgggtacaagtacctcggacccttcaacggactcgacaagggagagccggtcaacgaggcagacgccgcggccctcgagcacgacaaggcctacgaccggcagctcgacagcggagacaacccgtacctcaagtacaaccacgccgacgcggagtttcaggagcgccttaaagaagatacgtcttttgggggcaacctcggacgagcagtcttccaggcgaaaaagagggttcttgaacctctgggcctggttgaggaacctgttaagacggctccgggaaaaaagaggccggtagagcactctcctgtggagccagactcctcctcgggaaccggaaaagcgggccagcagcctgcaagaaaaagattgaattttggtcagactggagacgcagactccgtacctgacccccagcctctcggacagccaccagcagccccctctggtttgggatctactacaatggctacaggcagtggcgcaccagtggcagacaataacgagggtgccgatggagtgggtaattcctcaggaaattggcattgcgattcccaatggctgggcgacagagtcatcaccaccagcacccgaacctgggccctgcccacctacaacaaccacctctacaagcaaatctccagccaatcaggagcttcaaacgacaaccactactttggctacagcaccccctgggggtattttgacttcaacagattccactgccacttttcaccacgtgactggcaaagactcatcaacaacaactggggattccgacccaagaaactcaacttcaagctctttaacattcaagtcaaagaggtcacgcagaatgacggtacgacgacgattgccaataaccttaccagcacggttcaggtgtttactgactcggagtaccagctcccgtacgtcctcggctcggcgcatcaaggatgcctcccgccgtttccagcggacgtcttcatggtcccacagtatggatacctcaccctgaacaacgggagtcaggcggtaggacgctcttccttttactgcctggagtactttccttctcagatgctgcgtactggaaacaactttcagttcagctacacctttgaagacgttcctttccacagcagctacgctcacagccagagtctggatcggctgatgaatcctctgattgaccagtacctgtattatctgaacaagacacaatcaaatagtggaactcttcagcagtctcggctactgtttagtcaagctggacccaccagcatgtctcttcaagctaaaaactggctgcctggaccttgctacagacagcagcgtctgtcaaagcaggcaaacgacaacaacaacagcaactttccctggactgcggctacaaagtatcatctaaatggccgggactcgttggttaatccaggaccagctatggccagccacaaagacgatgaagaaaagtttttccccatgcatggaaccctgatatttggtaaacaaggaacaaatgctaacgacgcggatttggacaatgtcatgattacagatgaagaagaaatccgcaccaccaatcccgtggctacggagcagtacggatatgtctcaaataatttgcaaaactcaaatactggtccaactactggaactgtaaatcaccaaggagcgttacctggtatggtgtggcaggatcgagacgtgtacctgcagggacccatttgggccaagattcctcacaccgatggacactttcatccttctccactgatgggaggttttggactcaaacacccgcctcctcagatcatgatcaaaaacactcccgttccagccaatcctcccacaaacttcagttctgccaagtttgcttctttcatcacacagtattccacggggcaggtcagcgtggagatcgagtgggagctgcagaaggagaacagcaaacgctggaatcccgagattcagtacacttccaactacaacaaatctgttaatgtggactttactgtggacactaatggtgtgtattcagagcctcgccccattggcaccagatacctgactcgcaatctgtaattgcttgttaatcaataaaccgtttgattcgtttcagttgaactttggtctccgcgtacttctttcttatctagtttccatggctacgtagataagtagcatggcgggttaatcattaactacaaggaacccctagtgatggagttggccactccctctctgcgcgctcgctcgctcactgaggccgcccgggcaaacctctctgcgcgctcgctctttgcccgggcggcctcagtgagcgagcgagcgcgcagagagggagtggccaa

SEQ ID NO: 116 - DNA, 4680 bp, adeno-associated virus 2
ttggccactccctctctgcgcgctcgctcgctcactgaggccgggcgaccaaaggtcgcccgacgcccgggctttgcccgggcggcctcagtgagcgagcgagcgcgcagagagggagtggccaactccatcactaggggttcctggaggggtggagtcgtgacgtgaagtacgtcatagggttagggaggtcctgtattagaggtcacgtgagtgttttgcgacattttgcgacaccatgtggttacgcagggtatttaagcccgagtgagcacgcagggtctccattttaaagcgggaggtttgaacacgcagccgccatgccggggttttacgagattgtgattaaggtccccagcgaccttgacgagcatttgcccggcatttctgacagctttgtgaactgggtggccgagaaggaatgggagttgccgccagattctgacatggatctgaatctgattgagcaggcacccctgaccgtggccgagaagctgcagcgcgactttctgacggagtggcgccgtgtgagtaaggccccggaggctcttttctttgtgcaatttgagaagggagagagctacttccacatgcacgtgctggtggagaccaccggggtgaaatccatggttttgggacgtttcctgagtcagattcgcgaaaaactgattcagagaatttaccgcgggatcgagccgactttgccaaactggtttgcggtcacaaagacccgaaatggcgccggaggcgggaacaaggtggtggatgagtgctacatccccaattacctgctccccaaaacccagcctgagctccagtgggcgtggactaatatggaacagtatttaagcgcctgtttgaatctcgcggagcgtaaacggttggtggcgcagcatctgacgcacgtgtcgcagacgcaggagcagaacaaagagaatcagaatcccaattctgacgcgccggtgattagatcaaaaacctcagccaggtacatggagctggtcgggtggctcgtggacaaggggattacctcggagaagcagtggatccaggaggaccaggcttcatacatctccttcaatgcggcctccaactcgcggtcccagatcaaggctgctctggacaatgcgggaaagatcatgagcctaactaaaaccgcccccgactacctggtgggccagcagcccgtggaggacatttccagcaatcggatttataaaatcttggaactgaacgggtacgatccccaatacgcggcttccgtctttctgggatgggctacgaaaaagttcggcaagaggaacaccatctggctgtttgggcctgcaactaccgggaagaccaacattgcggaggctatagcccacactgtgcccttctacgggtgcgtaaactggaccaatgagaactttccattcaatgattgcgtcgacaagatggtgatctggtgggaggagggaaagatgaccgccaaggtcgtggagtcggccaaagccattctcggaggaagcaaggtgcgcgtggaccagaaatgcaagtcctcggcccagatagacccgactcccgtgatcgtcacctccaacaccaacatgtgcgccgtgattgacgggaactcaacgaccttcgaacaccagcagccgttgcaagaccggatgttcaaatttgaactcacccgccgtctggatcatgactttggaaaggtcaccaagcaggaagtcaaagactttttccggtgggcaaaggatcacgtggttgaggtggagcatgaattctacgtcaaaaagggtggagccaagaaaagacccgccccaagtgacgcagatataagtgagcccaaacgggtgcgcgagtcagttgcgcagccatcgacgtcagacgcggaagcttcgatcaactacgcggacaggtaccaaaacaaatgttctcgtcacgtgggcatgaatctgatgctatttccctgcagacaatgcgagagaatgaatcagaattcaaatatttgcttcactcacggacagaaagactgtttagagtgctttcccgtgtcagaatctcaacccgtttctgtcgtcaaaaaggcatatcagaaactgtgctacattcatcatatcatgggaaaggtgccagacgcttgcactgcctgcgatctggtcaatgtggatttggatgactgtatctctgaacaataaatgatttaaatcaggtatggctgccgatggttatcttccagattggctcgaggacactctctctgaaggaataagacagtggtggaagctcaaacctggcccaccaccaccaaagcccgcagagcggcataaggacgacagcaggggtcttgtgcttcctgggtacaagtacctcggacccttcaacggactcgacaagggagagccggtcaacgaggcagacgccgcggccctcgagcacgacaaggcctacgaccggcagctcgacagcggagacaacccgtacctcaagtacaaccacgccgacgcggagtttcaggagcgtcttaaagaagatacgtcttttgggggcaacctcggacgagcagtcttccaggcgaaaaagagggttcttgaacctctgggcctggttgaggaacctgttaaaacggctccgggaaaaaagaggccggtagagcactctcctgcggagccagactcctcctcgggaaccggaaaagcgggccagcagcctgcaagaaaaagattgaatttcggtcagactggagacgcagactccgtacctgacccccagcctctcggacagccaccagcagccccctctggtttgggatctactacaatggctacaggcagtggcgcaccaatggcagacaataacgagggtgccgatggagtgggtaattcctcaggaaattggcattgcgattcccaatggctgggcaacagagtcatcaccaccagcacccgaacctgggccctgcccacctacaacaaccacctctacaagcaaatttccagccaatcaggagcctcaaacgacaaccactactttggctacagcaccccttgggggtattttgacttcaacagattccactgccacttttcaccacgtgactggcaaagactcatcaacaacaactggggattccggcccaaaagactcaacttcaagctctttaacattcaagtcaaagaggtcacgcagaatgacggtacgacgacgattgccaataaccttaccagcacggttcaggtgtttactgactcggagtaccagctcccgtacgtcctcggctcggcgcatcaaggatgcctcccgccgttcccagcagacgtctttatggtcccacagtatggatacctcaccctgaacaacgggagtcaggcggtaggacgctcttccttttactgcctggagtactttccttctcagatgctgcgtactggaaacaactttcagttcagctacacctttgaagacgttcctttccacagcagctacgctcacagccagagtctggatcggctgatgaatcctctgatcgaccagtacctgtattatctaaacaagacacaatcaaatagtggaactcttcagcagtctcggctactgtttagccaagctggacccaccagcatgtctcttcaagctaaaaactggctgcctggaccttgctacagacagcagcgtctgtcaaagcaggcaaacgacaacaacaacagcaactttccctggactgcggctacaaagtatcatctaaatggccgggactcgttggttaatccaggaccagctatggccagccacaaagacgatgaagaaaagtttttccccatgcatggaaccctgatatttggtaaacaaggaacaaatgccaacgacgcggatttggacaatgtcatgattacagatgaagaagaaatccgcaccaccaatcccgtggctacggagcagtacggatatgtgtcaaataatttgcaaaactcaaatactggtccaactactggaactgtcaatcaccaaggagcgttacctggtatggtgtggcaggatcgagacgtgtacctgcagggacccatttgggccaagattcctcacaccgatggacactttcatccttctccactgatgggaggttttgggctcaaacacccgcctcctcagatcatgatcaaaaacactcccgttccagccaatcctccaacaaacttcagttctgccaagtttgcttctttcatcacacagtattccacgggacaggtcagcgtggagattgagtgggagctgcagaaggagaacagcaaacgctggaatcccgagattcagtacacttccaactacaacaaatctgttaatgtggactttactgtggacactaatggtgtgtattcagagcctcgccccattggcaccagatacctgactcgtaatctgtaattgcttgttaatcaataaaccgtttaattcgtttcagttgaactttggtctccgcgtacttcttttcttatctagtttccatggctacgtagataagtagcatggtgggtttatcattaactataaggaacccctagtgatggagttggccactccctctctgcgcgctcgctcgctcactgaggccgcccgggcaaagcccgggcgtcgggcgacctttgcccgggcggcctcagtgagcgagcgagcgcgcagagagggagtggccaa

SEQ ID NO: 117 - DNA, 4679 bp, adeno-associated virus 2
ttggccactccctctctgcgcgctcgctcgctcactgaggccgggcgaccaaaggtcgcccgacgcccgggctttgcccgggcggcctcagtgagcgagcgagcgcgcagagagggagtggccaactccatcactaggggttcctggaggggtggagtcgtgacgtgaagtacgtcatagggttagggaggtcctgtattagaggtcacgtgagtgttttgcgacattttgcgacaccatgtggtcacgctgggtatttaagcccgagtgagcacgcagggtctccattttaaagcgggaggtttgaacgggcagccgccatgccggggttttacgagattgtgattaaggtccccagcgaccttgacgagcatctgcccggcatttctgacagctttgtgcactgggtggccgagaaggaatgggagttgccgccagattctgacatgaatctgaatctgattgagcaggcacccctgaccgtggccgagaagctgcagcgcgactttctgacggagtggcgccgcgtgagtaaggccccggaggccctcttctttgtgcaatttgagaagggagagagctacttccacatgcacgtgctggtggagaccaccggggtgaaatccatggttttgggacgtttcctgagtcagattcgcgaaaaactgattcagagagtttaccgcgggatcgagccgactttgccaaattggttcgcggtcacaaagacccgaaatggcgccggaggcgggaacaaggtggtggatgagtgctacatccccaattacctgctccccaaaacccagcctgagctccagtgggcgtggactaatatggaacagtatttaagcgcctgtttgaatctcgcggagcgtaaacggttggtggcgcagcatctgacgcacgtgtcgcagacgcaggagcagaacaaagagaatcagaatcccaattctgacgcaccggtgatcagatcaaaaacctcagccaggtacatggagctggtcgggtggctcgtggacaaggggattacctcggagaagcagtggatccaggaggaccaggcttcatacatctccttcaatgcggcctccaactcgcggtcccaaatcaaggctgctctggacaatgcgggaaagatcatgagcctgactaaaaccgccccagactacctagtgggccagcagcccgtggaggacatttccagcaatcggatttataaaatcttggaattgaacgggtacgatccccaatacgcggcttccgtctttctgggatgggccacgaaaaagttcggcaagaggaacaccatctggctgtttgggcctgcaactaccgggaagaccaacatcgcggaggctatagcccacactgtgcccttctacgggtgcgtaaactggaccaatgagaactttcccttcaacgactgtgtcgacaagatggtgatctggtgggaggaggggaagatgaccgccaaggtcgtggagtcggccaaagccattctcggaggaagcaaggtgcgcgtggaccagaaatgtaagtcctcggcccagatagacccgactcccgtgatcgtcacctccaacaccaacatgtgcgccgtgattgacgggaactcaacgaccttcgaacaccagcagccgttgcaagaccggatgttcaaatttgaactcacccgccgtctggatcatgactttgggaaggtcaccaagcaggaagtcaaagactttttccggtgggcaaaggatcacgtggttgaggtggagcatgaattctacgtcaaaaagggtggagccaagaaaagacccgcccccagtgacgcagatataagtgagcccaaacgggcgcgcgagtcagttgcgcagccatcgacgtcagacgcggaagcttcgatcaactacgcggacaggtaccaaaacaaatgttctcgtcacgtgggcatgaatctgatgctgtttccctgcagacaatgcgagagaatgaatcagaattcaaatatctgcttcactcacggacagaaagactgtttagagtgctttcccgtgtcagaatctcaacccgtttctgtcgtcaaaaaggcgtatcagaaactttgctacattcatcatatcatgggaaaagtgccagacgcttgcagtgcctgcgatctggtcaatgtggatttggatgactgcatctctgaacaataaatgatttaaatcaggtatggctgccgatggttatcttccagattggctcgaggacactctctctgaaggaataagacagtggtggaagcttaaacctggcccaccaccaccaaagcccgcagagcggcataaggacgacagcaggggtcttgtgcttcctgggtacaagtacctcggacccttcaacggactcgacaagggagagccggtcaacgaggcagacgccgcggccctcgagcacgacaaggcctacgaccggcagctcgacagcggagacaacccgtacctcaagtacaaccacgccgacgcggagtttcaggagcgccttaaagaagatacgtcttttgggggcaacctcggacgagcagtcttccaggcgaaaaagagggttcttgaacctctgggcctggttgaggaacctgttaagacggctccgggaaaaaagaggccggtagagcactctcctgtggagccagactcctcctcgggaaccggaaaagcgggccagcagcctgcaagaaagagattgaatttcggtcagactggagacgcagactccgtacctgacccccagcctctcggacaaccaccagcagccccctctggtctgggatctactacaatggctacaggcagtggcgcaccaatggcagacaataacgagggtgccgatggagtgggtaattcctcaggaaattggcattgcgattcccaatggctgggcgacagagtcatcaccaccagcacccgaacctgggccctgcccacctacaacaaccacctctacaagcaaatctccagccaatcaggagcctcaaacgacaaccactactttggctacagcaccccctgggggtattttgacttcaacagattccactgccacttttcaccacgtgactggcaaagactcatcaacaacaactggggattccggcccaagagactcaacttcaagctctttaacattcaagtcaaagaggtcacgcagaatgacggtacgacgacgattgccaataaccttaccagcacggttcaggtgtttactgactcggagtaccagctcccgtacgtcctcggctcggcgcatcaaggatgcctcccgccgttcccagcagacgttttcatggtcccacagtatggatacctcaccctgaacaacgggagtcaggcggtaggacgctcttccttttactgcttggagtactttccttctcagatgctgcgtactggaaacaactttcagttcagctacacctttgaagacgttcctttccacagcagctacgctcacagccagagtctggatcggctgatgaatcctctgatcgaccagtacctgtattatctgaacaagacacaatcaaatagtggaacacttcagcagtctcggctactgtttagccaagctggacccaccagcatgtctcttcaagctaaaaattggctgcctggaccttgctacagacagcagcgtctgtcaaagcaggcaaacgacaacaacaacagcaactttccctggactgcggctacaaagtatcatctcaatggccgggactcgttggttaatccaggaccagctatggccagccacaaagatgatgaagaaaagtttttccccatgcatggaaccctgatatttggtaaacaaggaactggaagagacaacgcggatttggacaatgtcatgattacagatgaagaagaaatccgcaccaccaatcccgtggctacggagcagtacggatatgtgtcaaataatttgcaaaactcaaacactggtccaactactggaactgtcaatcaccaaggagcgttacctggtatggtgtggcaggatcgagacgtgtacctgcagggacccatttgggccaagattcctcacaccgatggacactttcatccttctccactgatgggaggttttggactcaaacacccacctcctcagatcatgattaaaaacactcccgttccagccaatcctcccacaaacttcagttctgccaagtttgcttctttcatcacacagtattccacggggcaggtcagcgtggagatcgagtgggagctgcagaaggagaacagcaaacgctggaaccccgagatccagtacacttccaactacaacaaatctgttaatgtggactttactgtggacactaatggtgtgtattcagagcctcgccccattggcaccagatacctgactcgtaatctgtaattgcttgttaatcaataaaccgtttaattcgtttcagttgaactttggtctctgcgtacttctttcttatctagtttccatggctacgtagataagtagcatggcgggttaatcattaactacaaggaacccctagtgatggagttggccactccctctctgcgcgctcgctcgctcactgaggccgggcgaccaaagcccgggcgtcgggcgacctttggtcgcccggcctcagtgagcgagcgagcgcgcagagagggagtggccaa

SEQ ID NO: 118 - DNA, 4681 bp, adeno-associated virus 2
ttggccactccctctctgcgcgctcgctcgctcactgaggccgggcgaccaaaggtcgcccgacgcccgggctttgcccgggcggcctcagtgagcgagcgagcgcgcagagagggagtggccaactccatcactaggggttcctggaggggtggagtcgtgacgtgaagtacgtcatagggttagggaggtcctgtattagagatcacgtgagtgttttgcgacattttgcgacaccatgtggtcacgccggttagttaagctcgagtgagcacgcagggtctccattttgaagcgggaagtttgaacgcgcagccgccatgccggggttttacgagattgtgattaaggtccccagcgaccttgacgagcatctgcccggcatttctgacagctttgtgaactgggtggccgagaaggaatgggagttgccgccagattctgacatgaatctgaatctgattgagcaggcacccctgaccgtggccgagaagctgcagcgcgactttctgacagaatggcgccgcgtgagtaaggccccggaggccctcttctttgtgcaatttgagaagggagaaagctatttccacatgcacgtgctggtggaaaccaccggggtgaaatccatggttttgggacgtttcctgagtcagattcgcgaaaaactgattcagagaatttaccgcgggatcgagccgactttgccaaattggttcgcggtcacaaagacccgaaatggcgccggaggcgggaacaaggtggtggatgagtgctacatccccaattacctgctccccaaaacccagcctgagctccagtgggcgtggactaatatggaacagtatttaagcgcctgtttgaacctcgcggagcgtaaacggttggtggcgcagcatctgacgcacgtgtcgcagacccaggagcagaacaaagagaatcagaatcccaattctgacgcgccggtgattagatcaaaaacctcagccaggtacatggagctggtcgggtggctcgtggataaggggattacctcggagaagcagtggatccaggaggaccaggcttcatacatctccttcaatgcggcctccaattcgcggtcccaaatcaaggctgctctggacaatgcgggaaagatcatgagcctgactaaaaccgcccccgactacctggtgggccagcagcccgtggaggacatttccggcaatcgaatttataaaatcttggaactgaatgggtacgatccccaatacgcggcttccgtctttctgggatgggccacgaaaaagttcggcaagaggaacaccatctggctgtttgggcctgcaactaccgggaagaccaacatcgcggaagccatagcccacacggtgcccttctacgggtgcgtaaactggaccaatgagaactttcccttcaacgactgtgtcgacaagatggtgatctggtgggaggaggggaagatgaccgccaaggtcgtggagtcggccaaagccattctcggaggaagcaaggtgcgcgtggaccagaaatgtaagtcctcggcccagatagacccgactcccgtgatcgtcacctccaacaccaacatgtgcgccgtgattgacgggaactcaacgaccttcgagcaccagcagccgttgcaagaccggatgttcaaatttgaacttacccgccgtctggatcatgactttgggaaggtcaccaagcaggaagtgaaagactttttccggtgggcaaaggatcacgtggttgaggtggagcatgaattctacgtcaaaaagggtggagctaagaaaaggcccgcccccagtgacgcagatataagtgagcccaaacgggcgcgcgagtcagttgcgcagccatcgacgtcagacgcggaagcttcaatcaactacgcggacaggtaccaaaacaaatgttctcgtcacgtgggcatgaatctgatgctgtttccctgcagacaatgcgagagaatgaatcagaattcaaatatctgcttcactcacggacagaaagactgtttagagtgctttcccgtgtcagaatctcaacccgtttctgtcgtcaaaaaggcgtatcagaaactttgctacattcatcatatcatgggaaaggtaccagacgcttgcactgcttgcgacctggtcaatgtggatttggatgactgcatctctgaacaataaatgatttaaatcaggtatggctgccgatggttatcttccagattggctcgaggacactctctctgaaggaataagacagtggtggaagctyaaacctggcccaccaccaccaaagcccgcagagcggcataaggacgacagcaggggtcttgtgcttcctgggtacaagtacctcggacccttcaacggactcgacaagggagagccggtcaacgaggcagacgccgcggccctcgagcacgacaaggcctacgaccggcagctcgacagcggagacaacccgtacctcaagtacaaccacgccgacgcggagtttcaggagcgtcttaaagaagatacgtcttttgggggcaacctcggacgagcagtcttccaggcgaaaaagagggttcttgaaactctgggcctggttgaggaacatgttaagacggctccgggtaaaaagagggcggtagagcatgctcatgtggagccagactcctcctcgggaaccggaaaggcgggccagcagcctgcaagaaaaagattgaattttggtcagactggagacgcagactccgtacctgacccccagcctctcggacagccaccagcagccccctytggtytgggatctactacaatggcttcaggcagtggcgcaccaatggcagacaataacgagggtgccgatggagtgggtaattcctcaggaaattggcattgcgattcccaatggctgggcgacagagtcatcaccaccagcacccgaacctgggccctgcccacctacaacaaccacctctacaagcaaatctccagccaatcaggagcttcaaacgacaaccactactttggctacagcaccccctgggggtattttgacttcaacagattccactgccacttttcaccacgtgactggcaaagactcatcaacaacaactggggattccgacccaaaagactcaacttcaagctctttaacattcaagtcaaggaggtcacgcagaatgacggtacgacgacgattgccaataaccttaccagcacggttcaggtgtttactgactcggagtaccagctcccgtacgtcctcggctcggcgcatcaaggatgcctcccgccgtttccagcggacgtcttcatggtcccacagtatggatacctcaccctgaacaacgggagtcaggcggtaggacgctcttccttttactgcctggagtactttccttctcaaatgctgcgtactggaaacaactttcagttcagctacacctttgaagacgttcctttccacagcagctacgctcacagccagagtctggatcggctgatgaatcctctgattgaccagtacctgtattatctgaacaagacacaatcaaatagtggaactcttcagcagtctcggctactgtttagtcaagctggacccaccagcatgtctcttcaagctaaaaactggctgcctggaccttgctacagacagcagcgtctgtcaaagcaggcaacggataacaacaacagtgaatttccctggactgcggctacaaagtatcatctcaatggccgggactcgttggttaatccaggaccagctatggccagccacaaagacgatgaagaaaagtttttccccatgcatggaaccctgatatttggtaaacaaggaactaaatgcaacgacgcggatttggacaatgttatgattacagatgaagaagaaatccgcaccaccaatcccgtggctacggagcagtacggatatgtgtcaaataatttgcaaaactcaaatactggtccaactactggaactgtcaatcaccaaggagcgttacctggtatggtgtggcaggatcgagacgtgtacctgcagggacccatttgggccaagattcctcacaccgatggacactttcatccttctccactgatgggaggttttggactcaaacacccacctcctcagatcatgatcaaaaacactcccgttccagccaatcctcccacaaactttagttctgccaagtttgcttctttcatcacacagtattccacggggcaagtcagcgtggagatcgagtgggagctgcagaaggagaacagcaaacgctggaaccccgagatccagtacacttccaactacaacaagtctgttaatgtggactttactgtggacactaatggcgtgtattcagagcctcgccccattggcaccagatacctgactcgtaatctgtaattgcttgttaatcaataaaccgtgtaattcgtttcagttgaactttggtctccgcgtacttctttttcttatctagtttccatggctacgtagataagtagcatggcgggtgaatcattaactacaaggaacccctagtgatggagttggccactccctctctgcgcgctcgctcgctcactgaggccgggcgaccaaaggtcgcccgacgcccgggctttgcccgggcggcctcagtgagcgagcgagcgcgcagagagggagtggccaa

SEQ ID NO: 119 - DNA, 2479 bp, adeno-associated virus 2
ggtatggctgccgatggttatcttccagattggctcgaggacactctctctgaaggaataagacagtggtggaagctcaaacctggcccaccaccaccaaagcccgcagagcggcataaggacgacagcaggggtcttgtgcttcctgggtacaagtacctcggacccttcaacggactcgacaagggagagccggtcaacgaggcagacgccgcggccctcgagcacgacaaagcctacgaccggcagctcgacagcggagacaacccgtacctcaagtacaaccacgccgacgcggagtttcaggagcgccttaaagaagatacgtcttttgggggcaacctcggacgagcagtcttccaggcgaaaaagagggttcttgaacctctgggcctggttgaggaacctgttaagacggctccgggaaaaaagaggccggtagagcactctcctgtggagccagactcctcctcgggaaccggaaaggcgggccagcagcctgcaagaaaaagattgaattttggtcagactggaccttatgcttccgtacctgacccccagcctctcggacagccaccagcagccccctctggtctgggaactaatacgatggctacaggcagtggcgcaccaatggcagacaataacgagggcgccgacggagtgggtaattcctcgggaaattggcattgcgattccacatggatgggcgacagagtcatcaccaccagcacccgcacctgggctctgcccacctacaacaaccatctgtacaagcagatttccagccagtctggagccagcaacgacaaccactactttggctacagcaccccctgggggtattttgacttcaacagattccactgccacttttcgccacgcgactggcagagactcatcaacaacaactggggattccggcccaaaagactcaacttcaagctgtttaacattcaagtcaaggaggtcacgcagaatgacggtacgacgacgattgccaataaccttaccagcacggttcaggtgtttactgactcggagtaccagctcccgtacgtcctcggctcggcgcatcaaggatgcctcccgccgttcccagcagacgtcttcatggtgccacagtatggatacctcaccctgaacaacgggagtcaggcggtcggacgctcttccttttactgcctggagtactttccttctcagatgcttcgtacaggaaacaactttaccttcagctacacctttgaagacgttcctttccacagcagctacgctcacagccagagtctggaccgtctcatgaatcctctcatcgaccagtacctgtattacttgagcagaacaaacacgccgagcggaaccaccacgcagtccaggcttcagttttctcaggccggagcgagtgacattcgggaccagtctaggaactggcttcctggaccctgttaccgccagcagcgagtatcaaagacagctgcggataacaacaacagtgaatactcgtggactggagctaccaagtaccacctcaatggcagagactctttggtgaatccgggcccggccatggccagccacaaggacgatgaagaaaagttttttcctcaaagcggggttctcatctttgggaagcaaggctcagagaaaacaaatgtggacattgaaaaggtcatgattacagacgaagaggaaatcaggaccaccaatcccgtggctacggagcagtatggtgctgtatctaccaacctccagagcggcaacacacaagcagctacctcagatgtcaacacacaaggcgttcttccaggcatggtctggcaggacagagacgtgtacctgcaggggcccatctgggcaaagattccacacacggacggacattttcacccctctcccctcatgggcggatttggactgaagcaccctcctccacagattctcattaagaataccccagtacctgcgaatccttctaccactttcagcgcggcaaagtttgcttccttcatcacacagtattccacggggcaggtcagcgtggagatcgaatgggagctgcaaaaggagaacagcaaacgctggaatcccgaaattcagtacacttcaaactacaacaaatctgttaatgtggactttactgtggacactaatggtgtgtattcagagcctcgccccattggcaccagatacctgactcgtaatctgtaattgcttgttaatcaataaaccgtgtaattcgtttcagttgaactttggtctctgcgtacttctttcttatctagtttccatggctacgtagataagtagcatggcgggttaatcattaacacaaggaacccctagtgatggagttggccactccctctctgcgcgctcgctcgctcactgaggccgggcgaccaaaggtcgcccgacgcccgggctttgcccgggcggcctcagtgagcgagcgagcgcgcagagagggagtggccaa

SEQ ID NO: 120 - DNA, 2416 bp, adeno-associated virus 2
tttaaatcaggtatggctgccgatggttatcttccagattggctcgaggacactctctctgaaggaataagacagtggtggaagctcaaacctggcccaccaccgccaaagcccgcagagcggcataaggacgacagcaggggtcttgtgcttcctgggtacaagtacctcggacccttcaacggactcgacaagggagagccggtcaacgaggcagacgccgcggccctcgagcacgacaaggcctacgaccggcagctcgacagcggagacaacccgtacctcaagtacaaccacgccgacgcggagtttcaggagcgccttaaagaagatacgtcttttgggggcaacctcggacgagcagtcttccaggcaaaaaagagggttcttgaacctctgggcctggttgaggagcctgttaagacggctccgggaaaaaagaggccggtagagcactctcctgcggagccagactcctcctcgggaaccggaaaagcgggcaaccagcctgcaagaaaaagattgaatttcggtcagactggagacgcagactccgtacctgacccccagcctctcggagaaccaccagcagcccccacaagtttgggatctactacaatggcttcaggcggtggcgcaccagtggcagacaataacgagggtgccgatggagtgggtaattcctcggggaaattggcattgcgattcccaatggctgggcgacagagtcattaccaccagcacccgaacctgggccctgcccacctacaacaaccatctgtacaagcaaatttccagccaatcaggagccagcaacgacaaccactaatcttggctcactgcaacccctgggggtattttgacttcaacagattccactgccacttttcaccacgtgactggcaaagactcatcaacaacaactggggattccggcccaaaagactcaacttcaagctctttaacattcaagtcaaagaggtcacgcagaatgacggtacgacgacgattgccaataaccttaccagcacggttcaggtgtttactgactcggagtaccagatcccgtacgtcctcggctcggcgcatcaaggatgcctcccgccgttcccagcagacgtcttcatggtgccacagtatggatacctcaccctgaacaacgggagtcaggcggtaggacgctcttccttttactgcttggagtactttccttctcagatgctgcgtactggaaacaacttccaattcagctacacctttgaagacgttcctttccacagcagctacgctcacagccagagtctggatcggctgatgaatcctctgatcgaccagtacctgtattatctgaacaagacacaatcagccagtggaactgttcagcagtctcggctactgtttagccaagctggacccaccagcatgtctcttcaagctaaaaactggctgcctggaccttgctacagacagcagcgtctgtcaaagcaggcaaacgaaaacaacaacagcaactttccctggactgcggctacaaagtatcatctcaatggccgggactcgttggttaatccaggaccagctatggccagtcacaaggatgacgaagaaaagtttttccccatgcatggaaccctgatatttggtaaacaaggaactggaagagacaacgcggatttggacaatgtcatgattacagatgaagaagaaatccgcaccaccaatcccgtggctacggagcagtacggatatgtgtcaaataatttgcaaaactcaaacactgctccgagtactggaactgtcaatcaccaaggagcgttacctggtatggtgtggcaggatagagacgtgtacctgcagggacccatttgggccaagattcctcacaccgatggacactttcatccttctccgctgatgggaggttttggactcaaacacccacctcctcagatcatgatcaaaaacactcccgttccagccaatcctcctacaaacttcagtgcggcaaaatttgcttcctttatcacacagtattccacgggacaggtcagcgtggagatcgagtgggagctgcagaaggagaacagcaaacgctggaaccccgagatccagtacacttccaactacaacaagtctgttaatgtggactttactgtggacactaatggtgtgtattcagagcctcgccccattggcaccagatacctgactcgtaatctgtaattgcttgttaatcaataaaccgtttaattcgtttcagttgaactttggtctctgcgtacttcttttcttatctagtttccatggctacgtagataagtagcatggcgggttaatcattaactctaaggaacccctagtgatggagttggccactccctctctgcgcgctcgcymscysmctswgscysksaaa

SEQ ID NO: 121 - protein, 735 aa, adeno-associated virus 2
MAADGYLPDWLEDTLSEGIRQWWKLKPGPPPPKPAERHKDDSRGLVLPGYKYLGPFNGLDKGEPVNEADAAALEHDKAYDRQLDSGDNPYLKYNHADAEFQERLKEDTSFGGNLGRAVFQAKKRVLEPLGLVEEPVKTAPGKKRPVEHSPVEPDSSSGTGKAGQQPARKRLNFGQTGDADSVPDPQPLGQPPAAPSGLGTNTMATGSGAPMADNNEGADGVGNSSGNWHCDSTWMGDRVITTSTRTWALPTYNNHLYKQISSQSGASNDNHYFGYSTPWGYFDFNRFHCHFSPRDWQRLINNNWGFRPKRLNFKLFNIQVKEVTQNDGTTTIANNLTSTVQVFTDSEYQLPYVLGSAHQGCLPPFPADVFMVPQYGYLTLNNGSQAVGRSSFYCLEYFPSQMLRTGNNFTFSYTFEDVPFHSSYAHSQSLDRLMNPLIDQYLYYLSRTNTPSGTTTQSRLQFSQAGASDIRDQSRNWLPGPCYRQQRVSKTAADNNNSEYSWTGATKYHLNGRDSLVNPGPAMASHKDDEEKFFPQSGVLIFGKQGSEKTNVDIEKVMITDEEEIRTTNPVATEQYGSVSTNLQSGNTQAATSDVNTQGVLPGMVWQDRDVYLQGPIWAKIPHTDGHFHPSPLMGGFGLKHPPPQILIKNTPVPANPSTTFSAAKFASFITQYSTGQVSVEIEWELQKENSKRWNPEIQYTSNYNKSVNVDFTVDTNGVYSEPRPIGTRYLTRNL

SEQ ID NO: 122 - DNA, 2208 bp, adeno-associated virus 2
atggctgccgatggttatcttccagattggctcgaggacactctctctgaaggaataagacagtggtggaagctcaaacctggcccaccaccaccaaagcccgcagagcggcataaggacgacagcaggggtcttgtgcttcctgggtacaagtacctcggacccttcaacggactcgacaagggagagccggtcaacgaggcagacgccgcggccctcgagcacgacaaggcctacgaccggcagctcgacagcggagacaacccgtacctcaagtacaaccacgccgacgcggagtttcaggagcgccttaaagaagatacgtcttttgggggcaacctcggacgagcagtcttccaggcgaaaaagagggttcttgaacctctgggcctggttgaggaacctgttaagacggctccgggaaaaaagaggccggtagagcactctcctgcggagccagactcctcctcgggaaccggaaaagcgggccaccagcctgcaagaaaaagattgaatttcggtcagactggagacgcagactccgtacctgacccccagcctctcggacagccaccagcagccccctctggtctgggaactaatacgatggctacaggcagtggcgcaccaatggcagacaataacgagggcgccgacggagtgggtaattcctcgggaaattggcattgcgattccacatggatgggcgacagagtcatcaccaccagcacccgaacctgggctctgcccacctacaacaaccatctgtacaagcagatttccagccaatcaggagcctcaaacgacaaccactactttggctacagcaccccctgggggtattttgacttcaacagattccactgccacttttcaccacgtgactggcaaagactcatcaacaacaactggggattccgacccaagagactcaacttcaagctctttaacattcaagtcaaagaggtcacgcagaatgacggtacgacgacgattgccaataaccttaccagcacggttcaggtgtttactgactcggagtaccagctcccgtacgtcctcggctcggcgcatcaaggatgcctcccgccgttcccagcagacgtcttcatggtgccacagtatggatacctcaccctgaacaacgggagtcaggcagtaggacgctcttcattttactgcctggagtactttccttctcagatgctgcgtaccggaaacaactttaccttcagctacacctttgaggacgttcctttccacagcagctacgctcacagccagagtttggaccgtctcatgaatcctctcatcgaccagtacctgtattacttgagcagaacaaacactccaagcggaaccaccacgcagtccaggcttcagttttctcaggccggagcgagtgacattcgggaccagtctaggaactggcttcctggaccctgttaccgccagcagcgagtatcaaagacagctgcggataacaacaacagtgaatactcgtggactggagctaccaagtaccacctcaatggcagagactctctggtgaatccgggcccggccatggccagccacaaggacgatgaagaaaagttttttcctcagagcggggttctcatctttgggaagcaaggctcagagaaaacaaatgtggacattgaaaaggtcatgattacagacgaagaggaaatcaggaccaccaatcccgtggctacggagcagtatggttctgtatctaccaacctccagagcggcaacacacaagcagctacctcagatgtcaacacacaaggcgttcttccaggcatggtctggcaggacagagacgtgtacctgcaggggcccatctgggcaaagattccacacacggacggacattttcacccctctcccctcatgggcggatttggacttaaacaccctcctccgcagattctcatcaagaacaccccggtacctgcgaatccttcgaccaccttcagtgcggcaaagtttgcttccttcatcacacagtactccacggggcaggtcagcgtggagatcgagtgggagctgcagaaggagaacagcaaacgctggaatcccgagatccagtacacttccaactacaacaaatctgttaatgtggactttactgtggacactaatggtgtgtattcagagcctcgccccattggcaccagatacctgactcgtaatctgtaa
